(19) United States
(12) Patent Application Publication
(10) Pub. No.: US 2015/0376652 A1
(43) Pub. Date: Dec. 31, 2015

(54) GENE EDITING IN THE OOCYTE BY CAS9 NUCLEASES

(71) Applicant: Helmholtz Zentrum München Deutsches Forschungszentrum Für Gesundheit Und Umwelt, Neuherberg (DE)

(72) Inventors: Ralf KÜHN, Freising (DE); Wolfgang WURST, München (DE); Oskar ORTIZ SANCHEZ, München (DE)

(73) Assignee: Helmholtz Zentrum München Deutsches Forschungszentrum Für Gesundheit Und Umwelt

(21) Appl. No.: 14/836,231

(22) Filed: Aug. 26, 2015

Related U.S. Application Data
(63) Continuation of application No. PCT/EP2014/053840, filed on Feb. 27, 2014.

(30) Foreign Application Priority Data
Feb. 27, 2013 (EP) 13157063.2

(51) Int. Cl. C12N 15/90; A61D 19/04; C12N 15/89

(52) U.S. Cl. CPC C12N 15/907; C12N 15/89; A61D 19/04

(57) ABSTRACT

The present invention relates to a method of producing a non-human, mammalian oocyte carrying a modified target sequence in its genome, the method comprising the steps of introducing into a non-human, mammalian oocyte: (a) a clustered, regularly interspaced, short palindromic repeats (CRISPR)-associated protein 9 (Cas9 protein) or a nucleic acid molecule encoding said Cas9 protein; and (b-i) a target sequence specific CRISPR RNA (crRNA) and a trans-activating crRNA (tracr RNA) or a nucleic acid molecule encoding said RNAs; or (b-ii) a chimaeric RNA sequence comprising a target sequence specific crRNA and tracrRNA or a nucleic acid molecule encoding said RNA; wherein the Cas9 protein introduced in (a) and the RNA sequence(s) introduced in (b-i) or (b-ii) form a protein/RNA complex that specifically binds to the target sequence and introduces a single or double strand break within the target sequence. The present invention further relates to the method of the invention, wherein the target sequence is modified by homologous recombination with a donor nucleic acid sequence further comprising the step: (c) introducing a nucleic acid molecule into the cell, wherein the nucleic acid molecule comprises the donor nucleic acid sequence and regions homologous to the target sequence. The present invention also relates to a method of producing a non-human mammal carrying a modified target sequence in its genome.

### RELATED APPLICATIONS

[0001] This application is a Continuation application filed under 35 USC §120 of International Application No. PCT/EP2014/053840, filed Feb. 27, 2014. This application claims priority under 35 USC §119 of EP Application 13157063.2 filed Feb. 27, 2013.

### BACKGROUND

[0002] The present invention relates to a method of producing a non-human, mammalian oocyte carrying a modified target sequence in its genome, the method comprising the steps of introducing into a non-human, mammalian oocyte: (a) a clustered, regularly interspaced, short palindromic repeats (CRISPR)-associated protein 9 (Cas9 protein) or a nucleic acid molecule encoding said Cas9 protein; and (b-i) a target sequence specific CRISPR RNA (crRNA) and a trans-activating crRNA (tracr RNA) or a nucleic acid molecule encoding said RNAs; or (b-ii) a chimaeric RNA sequence comprising a target sequence specific crRNA and tracrRNA or a nucleic acid molecule encoding said RNA; wherein the Cas9 protein introduced in (a) and the RNA sequence(s) introduced in (b-i) or (b-ii) form a protein/RNA complex that specifically binds to the target sequence and introduces a single or double strand break within the target sequence. The present invention further relates to the method of the invention, wherein the target sequence is modified by homologous recombination with a donor nucleic acid sequence further comprising the step: (c) introducing a nucleic acid molecule into the cell, wherein the nucleic acid molecule comprises the donor nucleic acid sequence and regions homologous to the target sequence. The present invention also relates to a method of producing a non-human mammal carrying a modified target sequence in its genome.

[0003] In this specification, a number of documents including patent applications and manufacturer's manuals is cited. The disclosure of these documents, while not considered relevant for the patentability of this invention, is herewith incorporated by reference in its entirety. More specifically, all referenced documents are incorporated by reference to the same extent as if each individual document was specifically and individually indicated to be incorporated by reference.

[0004] Gene targeting in embryonic stem (ES) cells is routinely applied to modify the mammalian genome, in particular the mouse genome, which established the mouse as the most commonly used genetic animal model (Capecchi M R (2005)). The basis for reverse mouse genetics was initially established in the 1980-ies, when ES cell lines were established from cultured murine blastocysts, culture conditions were identified that maintain their pluripotent differentiation state in vitro (Evans M J, Kaufman M H., Nature 1981; 292:154-6; Martin G R. Proc Natl Acad Sci USA 1981; 78:7634-8) and it was found that ES cells are able to colonize the germ line in chimaeric mice upon microinjection into blastocysts (Bradley et al., Nature 1984; 309:255-6; Gossler et al., Proc Natl Acad Sci USA 1986; 83:9065-9). Since the first demonstration of homologous recombination in ES cells in 1987 (Thomas K R, Capecchi M R., Cell 1987; 51:503-12) and the establishment of the first knockout mouse strain in 1989 (Schwartzberg P L, Goff S P, Robertson E J., Science 1989; 246:799-803) gene targeting was adopted to a plurality of genes and has been used in the last decades to generate more than 3000 knockout mouse strains that provided a wealth of information on in vivo gene functions (Collins F S, Rossant J, Wurst W., Cell 2007; 128:9-13; Capecchi, M. R., Nat Rev Genet 2005; 6: 507-12). Accordingly, gene targeting in ES cells has revolutionised the in vivo analysis of mammalian gene function using the mouse as genetic model system. However, at present this reverse genetics approach is restricted to mice, as germ line competent ES cell lines that can be genetically modified could be established only from these animals, so far. The exception from this rule is achieved by homologous recombination in primary cells from pig and sheep followed by the transplantation of nuclei from recombined somatic cells into enucleated oocytes (cloning) (Lai L, Prather R S. 2003. Reprod Biol Endocrinol 2003; 1:82; Gong M, Rong Y S. 2003. Curr Opin Genet Dev 13:215-220). However, since this methodology is inefficient and time consuming it did not develop into a simple routine procedure.

[0005] Although the generation of targeted mouse mutants as described above is by now well established as a routine procedure, this approach has the drawback that is usually requires a long time of hands on work for vector construction, ES cell culture and selection and the breeding of chimaeras. Additional problems that are often encountered during a gene targeting project are the low efficiency of homologous recombination in ES cells and the loss of the germ line competence of ES cells during the long in vitro culture and selection phase. Therefore, the successful generation of even a single line of knockout mice requires considerable time, the combined efforts of specialists in molecular biology, ES cell culture and embryo manipulation, and the associated technical infrastructure.

[0006] Experiments in model systems have demonstrated that the frequency of homologous recombination of a gene targeting vector is strongly increased if a double strand break is induced within its chromosomal target sequence (Rouet, P., Smih, F., Jasin, M.; Mol Cell Biol 1994; 14: 8096-8106; Rouet, P., Smih, F. Jasin, M.; Proc Natl Acad Sci USA 1994; 91: 6064-6068). In the absence of a gene targeting vector for homology directed repair, the cells frequently close the break by non-homologous end-joining (NHEJ). Since this mechanism is error-prone it frequently leads to the deletion or insertion of multiple nucleotides at the cleavage site. If the cleavage site is located within the coding region of a gene it is thereby possible to identify and select mutants that exhibit reading frameshift mutations from a mutagenised population and that represent non-functional knockout alleles of the targeted gene.

[0007] Direct genome editing by zinc-finger nucleases (ZFN) as well as TAL-nucleases in one-cell embryos has been recently established as a double strand break-based mutagenesis approach in mice, rats, rabbits and zebrafish (Carbery et al. (2010) Genetics 186:451-9; Cui et al. (2011) Nat Biotechnol 29:64-7; Doyon et al. (2008) Nat Biotechnol 26:702-8; Flisikowska et al. (2011) PLoS One 6:e21045; Meyer et al. (2010) Proc Natl Acad Sci USA 107:15022-6; Geurts A M, et al. (2009) Science 325:433; Huang (2011) Nat Biotechnol 29:699-700; Tesson (2011) Nat Biotechnol 29:695-696). Such nucleases are designed to induce double-strand breaks (DSBs) at preselected genomic target sites (Klug (2010) Annu Rev Biochem 79:213-231; Porteus & Carroll (2005) Nat Biotechnol 23:967-73; Porteus & Baltimore (2003) Science 300:763; Santiago et al. (2008) Proc Natl Acad Sci USA 105:5809-14). DSBs targeted to coding exons frequently undergo sequence deletions leading to gene knockout or allow the insertion (knock-in) of DNA sequences from gene targeting vectors via homologous recombination (HR). The generation of knockout and knock-in mutants at the Rosa26, Mdr1a, Pxr, and IgM loci by microinjection of ZFNs one-cell embryos of mice, rats and rabbits (Cui et al. (2011) Nat Biotechnol 29:64-7; Flisikowska et al. (2011) PLoS One 6:e21045; Meyer et al. (2010) Proc Natl Acad Sci USA 107:15022-6; Huang (2011) Nat Biotechnol 29:699-700; Tesson (2011) Nat Biotechnol 29:695-696) has recently been reported.

[0008] In addition, TAL elements have been combined with the FokI nuclease domain to create TAL-nuclease fusion proteins (TALENs) that enable to generate double-strand breaks within intended target regions (Christian M et al. (2010). Genetics 186:757-761; Cermak et al. (2011) Nucleic Acids Res 39:e82; Miller et al. (2011) Nat Biotechnol 29:143-148). TALENs were shown to enable gene editing in mammalian cell lines and in zebrafish, mouse and rat embryos (Sung et al. (2013) Nat Biotechnol 31:23-24; Tesson et al. (2011). Nat Biotechnol 29:695-696; Reyon et al. (2012). Nat Biotechnol 30:460-465).

[0009] However, even though the use of zinc finger nucleases results in a higher frequency of homologous recombination, considerable efforts and time are required to design zinc finger proteins that bind a new DNA target sequence at high efficiency. In addition, it has been calculated that using the presently available resources only one zinc finger nuclease could be found within a target region of 1000 basepairs of the mammalian genome (Maeder, et al. 2008 Mol Cell 31(2): 294-301; Maeder, et al. 2009 Nat Protoc 4(10): 1471-501). Further, the use of TALENs involves considerable efforts since it requires the de novo construction and expression of two large TAL-nuclease fusion proteins specifically for each target site. Also, the principles of the TAL peptide DNA recognition are still not fully understood, thus often leading to the necessity of time- and cost-consuming further experimentations in order to optimize the respective TALENs.

[0010] Recently, a novel system for inducing single or double strand breaks in target nucleic acid sequences has been found. This system is referred to in the art as CRISPR/Cas system, which stands for “clustered, regularly interspaced, short palindromic repeats (CRISPR)/CRISPR-associated protein”. It is based on an adaptive defense mechanism evolved by bacteria and archaea to protect them from invading viruses and plasmids, which relies on small RNAs for sequence-specific detection and silencing of foreign nucleic acids. CRISPR/Cas systems are composed of cas genes organized in operon(s) and CRISPR array(s) consisting of genome-targeting sequences (called spacers) interspersed with identical repeats (Bhaya et al. (2011) Annu Rev Genet 45:273-297; Barrangou R, Horvath P (2012) Annu Rev Food Sci Technol 3:143-162). CRISPR/Cas-mediated immunity in bacteria and archaea occurs in three steps. In the adaptive phase, bacteria and archaea harboring one or more CRISPR loci respond to viral or plasmid challenge by integrating short fragments of foreign sequence (protospacers) into the host chromosome at the proximal end of the CRISPR array. In the expression and interference phases, transcription of the repeat spacer element into precursor CRISPR RNA (pre-crRNA) molecules followed by enzymatic cleavage yields short crRNAs (CRISPR RNAs) that can subsequently pair with complementary protospacer sequences of invading viral or plasmid targets. Target recognition by crRNAs directs the silencing of the foreign sequences by means of Cas proteins that function in complex with the crRNAs.

[0011] There are three types of CRISPR/Cas systems (Makarova et al. (2011) Nat Rev Microbiol 9:467-477). The type I and III systems share some overarching features: specialized Cas endonucleases process the pre-crRNAs, and once mature, each crRNA assembles into a large multi-Cas protein complex capable of recognizing and cleaving nucleic acids complementary to the crRNA.

[0012] In contrast, type II systems process precrRNAs by a different mechanism in which a trans-activating crRNA (tracrRNA) complementary to the repeat sequences in pre-crRNA triggers processing by the double-stranded RNA specific ribonuclease RNase III in the presence of Cas9 (formerly Csn1) protein. Cas9 is the sole protein responsible for crRNA-guided silencing of foreign DNA.

[0013] Jinek et al. recently demonstrated that the Cas9 endonuclease family can also be programmed with single “chimaeric” RNA molecules, containing a target recognition sequence at the 5′ end followed by a hairpin structure retaining the base-pairing interactions that occur between the tracrRNA and the crRNA (Jinek et al. (2012 Science 337:816-821). This single transcript effectively fuses the 3′ end of crRNA to the 5′ end of tracrRNA, thereby mimicking the dual-RNA structure required to guide site-specific DNA cleavage by Cas9.

[0014] The Streptococcus pyogenes SF370 type II CRISPR locus consists of four genes, including the Cas9 nuclease, as well as two non-coding RNAs: tracrRNA and a pre-crRNA array containing nuclease guide sequences (spacers) interspaced by identical direct repeats (DRs) (Deltcheva et al. (2011) Nature 471:602-607).

[0015] Cong et al. (Cong et al. (2013). Science 339:819-823) recently applied this prokaryotic RNA-programmable nuclease system to introduce targeted double stranded breaks (DSBs) in mammalian chromosomes through heterologous expression of the key components. It has been previously shown (Jinek et al. (2012 Science 337:816-821) that expression of tracrRNA, pre-crRNA, host factor RNase III, and Cas9 nuclease are necessary and sufficient for cleavage of DNA in vitro. Expression of a codon optimized S. pyogenes Cas9 (SpCas9), of an 89-nucleotide (nt) tracrRNA and of a pre-crRNA comprising a single guide spacer flanked by DRs was expressed in human 293 cells. The initial spacer was designed to target a 30-basepair (bp) site (protospacer) in the human EMX1 locus that precedes an NGG, the requisite protospacer adjacent motif (PAM). Heterologous expression of the CRISPR system (SpCas9, SpRNase III, tracrRNA, and pre-crRNA) achieved targeted cleavage of mammalian chromosomes. In addition, a chimeric crRNA-tracrRNA hybrid was used, where a mature crRNA is fused to a partial tracrRNA via a synthetic stem-loop to mimic the natural crRNA:tracrRNA duplex. Cong et al. observed cleavage of all protospacer targets when SpCas9 was co-expressed with pre-crRNA (DRspacer-DR) and tracrRNA. Furthermore, Cong et al. showed that also the Streptococcus thermophilus LMD-9 CRISPR1 system can mediate mammalian genome cleavage.

[0016] In another recent report, Mali et al. (Mali et al. (2013); Science 339: 823-826) independently confirmed high efficiency CRISPR-mediated genome targeting in several human cell lines, while Hwang et al. (Hwang et al. (2013); Nature Biotechnology doi:10.1038/nbt.2501) showed that this system may also be employed in zebrafish.

[0017] Whereas this system has been shown to be functional in mammalian cells such as human embryonal kidney cells (such as e.g. 293T or 293 FT cells), human chronic myeloid leukemia cells (such as K562 cells) or induced pluripotent stem cells, no attempts have been reported to employ this system in oocytes/zygotes.

[0018] As totipotent single entities, mammalian zygotes could be regarded as a preferred substrate for genome engineering since the germ line of the entire animal is accessible within a single cell. However, the experimental accessibility and manipulation of zygotes is severely restricted by the very limited numbers at which they are available (dozens-hundred) and their very short lasting nature. These parameters readily explain that the vast majority of genome manipulations, that occur at frequencies of below 10⁻⁵ like gene targeting, can be successfully performed only in cultured embryonic stem cells that are grown up to a number of 10⁷ cells in a single standard culture plate. The only exception from this rule concerns the generation of transgenic mice by pronuclear DNA injection that has been developed into a routine procedure due to the high frequency of transgene integration in up to 30% of injected zygotes (Palmiter R D, Brinster R L.; Annu Rev Genet 1986; 20:465-499). Since microinjected transgenes randomly integrate into the genome, this method can only be used to express additional genes on the background of an otherwise normal genome, but does not allow the targeted modification of endogenous genes.

[0019] An early report to characterize the potential of zygotes for targeted gene manipulation by Brinster (Brinster R L, Braun R E, Lo D, Avarbock M R, Oram F, Palmiter R D.; Proc Natl Acad Sci USA 1989; 86:7087-7091) showed that this approach is not practical as only one targeted mouse was obtained from >10.000 zygotes within 14 months of injections. Thus, Brinster et al. discouraged any further attempts in this direction. In addition to a low recombination frequency, Brinster et al. noted a high number of spontaneously occurring, undesired mutations within the targeted allele that severely compromised the function of the (repaired) histocompatibility class II gene. From the experience of Brinster et al. it could be extrapolated that the physiological, biochemical and epigenetic context of genomic DNA in the zygotic pronuclei are unfavourable to achieve targeted genetic manipulations, except for the random integration of transgenes that occurs at high frequency.

[0020] In addition, the biology of oocyte development into an embryo provides further obstacles for targeted genetic manipulations.

[0021] A growing mouse oocyte, arrested at diplotene of its first meiotic prophase, transcribes and translates many of its own genes, thereby producing a store of proteins sufficient to support development up to the 8-cell stage. These transcripts guide oocytes on the two steps of oocyte maturation and egg activation to become zygotes. Typically, oocytes are ovulated and become competent for fertilisation before reaching a second arrest point. When an oocyte matures into an egg, it arrests in metaphase of its second meiotic division where transcription stops and translation of mRNA is reduced. At this point an ovulated mouse egg has a diameter of 0.085 mm and, with a volume of ˜300 picoliter, it exceeds the size of a typical somatic cell by a 1000-fold (Nagy A, Gertsenstein M, Vintersten K, Behringer R., 2003. Manipulating the Mouse Embryo. Cold Spring Harbour, N.Y.: Cold Spring Harbour Laboratory Press). The re-modeling of a fertilised oocyte into a totipotent zygote is one of the most complex cell transformations in biology. Remarkably, and in stark contrast to other mammalian cell types, this transition occurs in the absence of transcription factors and therefore depends on proteins and mRNAs accumulated in the oocyte during oogenesis. The embryonic development of a mammal begins when sperm fertilises an egg to form a zygote. Fertilization of the egg triggers egg activation to complete the transformation to a zygote by signaling the completion of meiosis and the formation of pronuclei. At this stage the zygote represents a 1-cell embryo that contains a haploid paternal pronucleus derived from the sperm and a haploid maternal pronucleus derived from the oocyte. In mice this totipotent single cell stage lasts for only ˜18 hours until the first mitotic division occurs.

[0022] In fertilized mammalian eggs, the two pronuclei that undergo DNA replication, do not fuse directly but approach each other and remain distinct until the membrane of each pronucleus has broken down in preparation for the zygote's first mitotic division that produces a 2-cell embryo. The 1-cell zygote stage is characterised by unique transcriptional and translation control mechanisms. One of the most striking features is a time-dependent mechanism, referred to as the zygotic clock, that delays the expression of the zygotic genome for ˜24 h after fertilization, regardless of whether or not the one-cell embryo has completed S phase and formed a two-cell embryo (Nothias J Y, Majumder S, Kaneko K J, DePamphilis M L.; J Biol Chem 1995; 270:22077-22080). In nature, the zygotic clock provides the advantage of delaying zygotic gene activation (ZGA) until chromatin can be remodelled from a condensed meiotic state to one in which selected genes can be transcribed. Since the paternal genome is completely packaged with protamines that must be replaced with histones, some genes would be prematurely expressed if ZGA were not prevented. Cell-specific transcription requires that newly minted zygotic chromosomes repress most, if not all, promoters until development progresses to a stage where specific promoters can be activated by specific enhancers or trans-activators. In the mouse, formation of a 2-cell embryo marks the transition from maternal gene dependence to zygotic gene activation (ZGA). Among mammals, the extent of development prior to zygotic gene activation (ZGA) varies among species from one to four cleavage events. Maternal mRNA degradation is triggered by meiotic maturation and 90% completed in 2-cell embryos, although maternal protein synthesis continues into the 8-cell stage. In addition to transcriptional control, the zygotic clock delays the translation of nascent mRNA until the 2-cell stage (Nothias J Y, Miranda M, DePamphilis M L.; EMBO J 1996; 15:5715-5725). Therefore, the production of proteins from transgenic expression vectors injected into pronuclei is not achieved until 10-12 hours after the appearance of mRNA.

[0023] WO2011/051390 describes a method for modifying a target sequence in the genome of a mammalian or avian oocyte by homolgous recombination using a zinc finger nuclease and, thus, a method of producing a non-human mammal carrying a modified target sequence in its genome. However, since this method makes use of a zinc finger protein, it is associated with the drawbacks described above with regard to zinc finger proteins. No indication is provided in WO2011/051390 that successful recombination in oocytes could be achieved by any other means but zinc finger proteins.

[0024] WO2011/154393 describes a method of modifying a target sequence in the genome of a eukaryotic cell, wherein a fusion protein comprising a DNA-binding domain of a TaI effector protein and a non-specific cleavage domain of a restriction nuclease is employed to introduce a double strand break within the target sequence, thereby enhancing the modification of the target sequence by homologous recombination. It is further described that the method can be applied to oocytes and that it can be used to produce a non-human mammal or vertebrate carrying a modified target sequence in its genome. However, the only methods for introducing double strand breaks and enhancing the frequency of homologous recombination that are described in WO2011/154393 are the use of zinc finger proteins or fusion proteins comprising a DNA-binding domain of a TaI effector protein and a non-specific cleavage domain of a restriction nuclease. No reference is made to the CRISPR/Cas system and no indication is provided that the frequency of homologous recombination in oocytes could be enhanced by any means other than Zinc finger proteins or the claimed fusion proteins.

[0025] Thus, whereas methods have been described in the art for the generation of transgenic animals carrying targeted modifications in their genome, there is still a need to provide means to generate genetically modified animals faster, easier and more cost-effective than using any of the prior art methods.

[0026] This need is addressed by providing the embodiments characterized in the claims.

### DISCLOSURE

[0027] Accordingly, the present invention relates to a method of producing a non-human, mammalian oocyte carrying a modified target sequence in its genome, the method comprising the steps of introducing into a non-human, mammalian oocyte: (a) a clustered, regularly interspaced, short palindromic repeats (CRISPR)-associated protein 9 (Cas9 protein) or a nucleic acid molecule encoding said Cas9 protein; and (b-i) a target sequence specific CRISPR RNA (crRNA) and a trans-activating crRNA (tracr RNA) or a nucleic acid molecule encoding said RNAs; or (b-ii) a chimaeric RNA sequence comprising a target sequence specific crRNA and tracrRNA or a nucleic acid molecule encoding said RNA; wherein the Cas9 protein introduced in (a) and the RNA sequence(s) introduced in (b-i) or (b-ii) form a protein/RNA complex that specifically binds to the target sequence and introduces a single or double strand break within the target sequence.

[0028] The term “oocyte”, as used herein, refers to the female germ cell involved in reproduction, i.e. the ovum or egg cell. In accordance with the present invention, the term “oocyte” comprises both oocytes before fertilisation as well as fertilised oocytes, which are also called zygotes. Thus, the oocyte before fertilisation comprises only maternal chromosomes, whereas an oocyte after fertilisation comprises both maternal and paternal chromosomes. After fertilisation, the oocyte remains in a double-haploid status for several hours, in mice for example for up to 18 hours after fertilisation.

[0029] In a more preferred embodiment of the method of the invention, the oocyte is a fertilised oocyte.

[0030] The term “fertilised oocyte”, as used herein, refers to an oocyte after fusion with the fertilizing sperm. For a period of many hours (such as up to 18 hours in mice) after fertilisation, the oocyte is in a double-haploid state, comprising one maternal haploid pronucleus and one paternal haploid pronucleus. After migration of the two pronuclei together, their membranes break down, and the two genomes condense into chromosomes, thereby reconstituting a diploid organism. This fertilised oocyte, also referred to as a one-cell zygote and also the 2-cell and 4-cell stage zygote, are also encompassed by the term “fertilised oocyte”, as used herein.

[0031] Preferably, the mammalian oocyte used in the method of the present invention is a fertilised mammalian oocyte in the double-haploid state.

[0032] In accordance with the present invention, a “modified target sequence” is a nucleotide sequence in which genomic manipulations have led to an alteration of the respective target nucleotide sequence. The term “target sequence in the genome”, as used herein, refers to the genomic location that is to be modified by the method of the invention. The “target sequence in the genome” comprises but is not restricted to the nucleotide(s) subject to the particular modification, i.e. the “target sequence in the genome” also comprises the sequence surrounding the relevant nucleotide(s) to be modified. Preferably the “target sequence in the genome” also comprises at least 10, such as at least 100, such as at least 200, such as at least 500, such as at least 1000 nucleotide(s) upstream and/or downstream of the relevant nucleotide(s) to be modified.

[0033] More preferably, the term “target sequence” refers to the entire gene to be modified.

[0034] The term “modified” includes, but is not limited to, one or more nucleotides that are substituted, inserted and deleted within the target sequence.

[0035] The term “substitution”, as used herein, is defined in accordance with the pertinent art and refers to the replacement of nucleotides with other nucleotides. The term includes for example the replacement of single nucleotides resulting in point mutations. Said point mutations can lead to an amino acid exchange in the resulting protein product but may also not be reflected on the amino acid level (i.e. silent mutations). Also encompassed by the term “substitution” are mutations resulting in the replacement of multiple nucleotides, such as for example parts of genes, such as parts of exons or introns as well as the replacement of entire genes. The number of nucleotides that replace the originally present nucleotides may be the same or different (i.e. more or less) as compared to the number of nucleotides removed. Preferably, the number of replacement nucleotides corresponds to the number of originally present nucleotides that are substituted.

[0036] The term “insertion”, in accordance with the present invention, is defined in accordance with the pertinent art and refers to the incorporation of one or more nucleotides into a nucleic acid molecule. Insertion of parts of genes, such as parts of exons or introns as well as insertion of entire genes is also encompassed by the term “insertion”. When the number of inserted nucleotides is not dividable by three, the insertion can result in a frameshift mutation within a coding sequence of a gene. Such frameshift mutations will alter the amino acids encoded by a gene following the mutation. In some cases, such a mutation will cause the active translation of the gene to encounter a premature stop codon, resulting in an end to translation and the production of a truncated protein. When the number of inserted nucleotides is instead dividable by three, the resulting insertion is an “in-frame insertion”. In this case, the reading frame remains intact after the insertion and translation will most likely run to completion if the inserted nucleotides do not code for a stop codon. However, because of the inserted nucleotides, the finished protein will contain, depending on the size of the insertion, one or multiple new amino acids that may affect the function of the protein.

[0037] The term “deletion”, as used in accordance with the present invention, is defined in accordance with the pertinent art and refers to the loss of nucleotides or larger parts of genes, such as exons or introns as well as entire genes. As defined with regard to the term “insertion”, the deletion of a number of nucleotides that is not evenly dividable by three will lead to a frameshift mutation, causing all of the codons occurring after the deletion to be read incorrectly during translation, potentially producing a severely altered and most likely non-functional protein. If a deletion does not result in a frameshift mutation, i.e. because the number of nucleotides deleted is dividable by three, the resulting protein is nonetheless altered as the finished protein will lack, depending on the size of the deletion, one or several amino acids that may affect the function of the protein.

[0038] The above defined modifications are not restricted to coding regions in the genome, but can also be introduced into non-coding regions of the target genome, for example in regulatory regions such as promoter or enhancer elements or in introns.

[0039] Examples of modifications of the target genome include both targeted and random modifications, such as e.g. the introduction of mutations into a wildtype gene in order to analyse its effect on gene function; the replacement of an entire gene with a mutated gene or, alternatively, if the target sequence comprises mutation(s), the alteration of these mutations to identify which one is causative of a particular effect; the removal of entire genes or proteins or the removal of regulatory elements from genes or proteins as well as the introduction of fusion-partners, such as for example purification tags such as the his-tag or the tap-tag.

[0040] In a first step, step (a), a clustered, regularly interspaced, short palindromic repeats (CRISPR)-associated protein 9 (Cas9 protein or nucleic acid molecule encoding said Cas9) is introduced into a non-human, mammalian oocyte.

[0041] The term “introducing into the oocyte”, as used herein, relates to any known method of bringing a protein or a nucleic acid molecule into an oocyte. Non-limiting examples include microinjection, infection with viral vectors, electroporation and the formulation with cationic lipids.

[0042] All these methods are well known in the art.

[0043] The term “Cas9 protein” refers to the “clustered, regularly interspaced, short palindromic repeats (CRISPR)-associated protein 9”. This term is well known in the art and has been described, e.g. in Makarova et al. (2011). Nat Rev Microbiol 9:467-477 and in Makarova et al. (2011) Biol Direct 6:38.

[0044] Cas proteins are endonuclease that form part of an adaptive defense mechanism evolved by bacteria and archaea to protect them from invading viruses and plasmids, as discussed herein above. Cas9 proteins constitute a family of enzymes that require a base-paired structure formed between an activating tracrRNA and a targeting crRNA to cleave target dsDNA. Site-specific cleavage occurs at locations determined by both base-pairing complementarity between the crRNA and the target protospacer DNA and a short motif, referred to as the protospacer adjacent motif (PAM), juxtaposed to the complementary region in the target DNA (Jinek et al. (2012 Science 337:816-821)). The tracrRNA:crRNA-guided Cas9 protein makes use of distinct endonuclease domains (HNH and RuvC-like domains) to cleave the two strands in the target DNA. Target recognition by e.g. Streptococcus pyogenes SF370 type II Cas9 requires both a seed sequence in the crRNA and a GG dinucleotide-containing PAM sequence adjacent to the crRNA-binding region in the DNA target (Jinek et al. (2012 Science 337:816-821).

[0045] Any Cas9 protein known in the art may be employed in accordance with the present invention. So far, at least 65 different Cas9 proteins related to the Streptococcus pyogenes SF370 type II Cas9 protein have been described. These proteins, previously named Csn1, were reclassified into a family of Cas9 proteins (Makarova et al. (2011). Nat Rev Microbiol 9:467-477; Makarova et al. (2011) Biol Direct 6:38). The Cas9 family includes, without being limiting, the following family members referred to by their gene numbers according to the eggNOG (evolutionary genealogy of genes: Non-supervised Orthologous Groups) database (see the world wide web at eggnog.embl.de/version_{—}3.0/): gene No. Acel_{—}1951 (HNH endonuclease) (SEQ ID NO:17) of Acidothermus cellulolyticus, gene No. Amuc_{—}2010 (hypothetical protein) (SEQ ID NO:18) of Akkermansia muciniphila, gene No. Asuc_{—}0376 (CRISPR-associated endonuclease Csn1 family protein) (SEQ ID NO:19) of Actinobacillus succinogenes, gene No. BBta_{—}3952 (hypothetical protein) (SEQ ID NO:20) of Bradyrhizobium sp. BTAi1, gene No. BF3954 (hypothetical protein) (SEQ ID NO:21) of Bacteroides fragilis 9343, gene No. Ccel_{—}3120 (CRISPR-associated protein, Csn1 family) (SEQ ID NO:22) of Clostridium cellulolyticum, gene No. Cj1523c (putative CRISPR-associated protein) (SEQ ID NO:23) of Campylobacter jejuni 11168, gene No. Coch_{—}0568 (CRISPR-associated protein, Csn1 family) (SEQ ID NO:24) of Capnocytophaga ochracea, gene No. DIP0036 (hypothetical protein) (SEQ ID NO:25) of Corynebacterium diphtheriae, gene No. Dshi_{—}0400 (CRISPR-associated protein) (SEQ ID NO:26) Dinoroseobacter shibae, gene No. Dtpsy_{—}0060 (CRISPR-associated protein, Csn1 family) (SEQ ID NO:27) of Diaphorobacter sp. TPSY, gene No. Emin_{—}0243 (CRISPR-associated endonuclease Csn1 family protein) (SEQ ID NO:28) of Elusimicrobium minutum, gene No. EUBREC_{—}1713 (CRISPR-system related protein) (SEQ ID NO:29) of Eubacterium rectal, gene No. Fisuc_{—}0140 (CRISPR-associated protein, Csn1 family) (SEQ ID No:30) of Fibrobacter succinogenes, gene No. FMG_{—}0058 (hypothetical protein) (SEQ ID N0:31) of Finegoldia magna, gene No. FP1524 (CRISPR-associated endonuclease Csn1 family protein) (SEQ ID N0:32) of Flavobacterium psychrophilum, gene No. gbs0911 (hypothetical protein) (SEQ ID N0:33) of Streptococcus agalactiae NEM316, gene No. GDI2123 (hypothetical protein) (SEQ ID NO:34) of Gluconacetobacter diazotrophicus, gene No. HH_{—}1476 (hypothetical protein) (SEQ ID NO:35) of Helicobacter hepaticus, gene No. LCABL_{—}23780 (hypothetical protein) (SEQ ID N0:36) of Lactobacillus casei BL23, gene No. lin2744 (hypothetical protein) (SEQ ID N0:37) of Listeria innocua, gene No. LSL_{—}0095 (hypothetical protein) (SEQ ID N0:38) of Lactobacillus salivarius, gene No. M28_Spy0748 (putative cytoplasmic protein) (SEQ ID N0:39) of Streptococcus pyogenes MGAS6180, gene No. MGAS10270_Spy0886 (putative cytoplasmic protein) (SEQ ID N0:40) of Streptococcus pyogenes MGAS10270, gene No. MGAS10750_Spy0921 (hypothetical cytosolic protein) (SEQ ID NO:41) of Streptococcus pyogenes MGAS10750, gene No. MGAS2096_Spy0843 (putative cytoplasmic protein) (SEQ ID NO:42) of Streptococcus pyogenes MGAS2096, gene No. MGAS9429_Spy0885 (putative cytoplasmic protein) (SEQ ID NO:43) of Streptococcus pyogenes MGAS9429, gene No. MMOB0330 (hypothetical protein) (SEQ ID NO:44) of Mycoplasma mobile, gene No. MS53_{—}0582 (hypothetical protein) (SEQ ID NO:45) of Mycoplasma synoviae, gene No. Nham_{—}2832 (hypothetical protein) (SEQ ID NO:46) of Nitrobacter hamburgensis, gene No. Nham_{—}4054 (hypothetical protein) (SEQ ID NO:47) of Nitrobacter hamburgensis, gene No. NMA0631 (hypothetical protein) (SEQ ID NO:48) of Neisseria meningitidis Z2491, gene No. NMO_{—}0348 (putative CRISPR-associated protein) (SEQ ID NO:49) of Neisseria meningitidis alpha14, gene No. Plav_{—}0099 (CRISPR-associated endonuclease Csn1 family protein) (SEQ ID NO:50) of Parvibaculum lavamentivorans, gene No. PM1127 (hypothetical protein) (SEQ ID NO:51) of Pasteurella multocida, gene No. RPC_{—}4489 (hypothetical protein) (SEQ ID NO:52) of Rhodopseudomonas palustris BisB18, gene No. RPD_{—}1029 (CRISPR-associated Cas5e family protein) (SEQ ID NO:53) of Rhodopseudomonas palustris BisB5, gene No. Rru_A0453 (CRISPR-associated endonuclease Csn1 family protein) (SEQ ID NO:54) of Rhodospirillum rubrum, gene No. SAG0894 (hypothetical protein) (SEQ ID NO:55) of Streptococcus agalactiae 2603V/R, gene No. SAK_{—}1017 (hypothetical protein) (SEQ ID NO:56) of Streptococcus agalactiae A909, gene No. Smon_{—}1063 (CRISPR-associated protein, Csn1 family) (SEQ ID NO:57) of Streptobacillus moniliformis, gene No. SMU_{—}1405c (hypothetical protein) (SEQ ID NO:58) of Streptococcus mutans, gene No. SPs1176 (hypothetical protein) (SEQ ID NO:59) of Streptococcus pyogenes SSI1, gene No. Spy49_{—}0823 (hypothetical protein) (SEQ ID NO:60) of Streptococcus pyogenes NZ131, gene No. SPy_{—}1046 (hypothetical protein) (SEQ ID NO:61) of Streptococcus pyogenes M1 GAS, gene No. SPy_{—}1046 (putative cytoplasmic protein) (SEQ ID NO:62) of Streptococcus pyogenes MGAS5005, gene No. STER_{—}0709 (CRISPR-system-like protein) (SEQ ID NO:63) of Streptococcus thermophilus LMD9, gene No. STER_{—}1477 (CRISPR-system-like protein) (SEQ ID NO:64) of Streptococcus thermophilus LMD9, gene No. str0657 (hypothetical protein) (SEQ ID NO:65) of Streptococcus thermophilus Z1066, gene No. stu0657 (hypothetical protein) (SEQ ID NO:66) of Streptococcus thermophilus 18311, gene No. TDE_{—}0327 (CRISPR-associated Cas5e family protein) (SEQ ID NO:67) of Treponema denticola, gene No. TGRD_{—}056 (Csn1-like CRISPR-associated protein) (SEQ ID NO:68) of Uncultered bacterium TG1RsD17, gene No. TGRD_{—}222 (CRISPR-associated protein Csn1) (SEQ ID NO:69) of Uncultered bacterium TG1RsD17, gene No. Veis_{—}1230 (CRISPR-associated endonuclease Csn1 family protein) (SEQ ID NO:70) of Verminephrobacter eiseniae, gene No. WS1445 (hypothetical protein) (SEQ ID NO:71) of Wolinella succinogenes, and the microbial proteins of SEQ ID NO:72 to 81.

[0046] The Streptococcus pyogenes SF370 type II Cas9 has been described in e.g. Jinek et al. (2012 Science 337:816-821) and has an amino acid sequence as shown in SEQ ID NO:14. A version of this Cas9 protein optimised for use in mammalian cells has been employed in the appended examples and is shown in SEQ ID NO:2.

[0047] The Cas9 protein may also be a modified Cas9 protein, wherein the nuclease function of the protein is altered into a nicking endonuclease function. In other words, the naturally occurring Cas9 endonucleases function of cleaving both strands of a double-stranded target DNA, is altered into an endonuclease that cleaves (i.e. nicks) only one of the strands. Means and methods of modifying a Cas9 protein accordingly are well known in the art, and include for example the introduction of amino acid replacements into Cas9 that render one of the nuclease domains inactive. More specifically, aspartate can for example be replaced against alanine at position 10 of the Streptococcus pyogenes Cas9 (see for example the Cas9 D10A variant shown in SEQ ID No: 15), as shown by Cong et al. (2013) Science 339:819-823.

[0048] The use of a modified Cas9 protein having nicking endonuclease function provides the advantage that the thus introduced DNA damage in the genome is more likely to be repaired via homologous recombination, instead of by nonhomologous end joining.

[0049] In accordance with the method of the invention, the Cas9 protein may be introduced as a protein, but alternatively the Cas9 protein may also be introduced in form of a nucleic acid molecule encoding said protein. It will be appreciated that the nucleic acid molecule encodes said Cas9 protein in expressible form such that expression in the oocyte results in a functional Cas9 protein. Means and methods to ensure expression of a functional polypeptide are well known in the art. For example, the coding sequences may be comprised in a vector, such as for example a plasmid, cosmid, virus, bacteriophage or another vector used conventionally e.g. in genetic engineering. The coding sequences inserted in the vector can e.g. be synthesized by standard methods, or isolated from natural sources. The coding sequences may further be ligated to transcriptional regulatory elements and/or to other amino acid encoding sequences. Such regulatory sequences are well known to those skilled in the art and include, without being limiting, regulatory sequences ensuring the initiation of transcription, internal ribosomal entry sites (IRES) (Owens, Proc. Natl. Acad. Sci. USA 98 (2001), 1471-1476) and optionally regulatory elements ensuring termination of transcription and stabilization of the transcript. Non-limiting examples for regulatory elements ensuring the initiation of transcription comprise a translation initiation codon, transcriptional enhancers such as e.g. the SV40-enhancer, insulators and/or promoters, such as for example the cytomegalovirus (CMV) promoter, SV40-promoter, RSV-promoter (Rous sarcome virus), the lacZ promoter, chicken beta-actin promoter, CAG-promoter (a combination of chicken beta-actin promoter and cytomegalovirus immediate-early enhancer), the gai10 promoter, human elongation factor 1α-promoter, AOX1 promoter, GAL1 promoter CaM-kinase promoter, the lac, trp or tac promoter, the lacUV5 promoter, the autographa californica multiple nuclear polyhedrosis virus (AcMNPV) polyhedral promoter or a globin intron in mammalian and other animal cells. Non-limiting examples for regulatory elements ensuring transcription termination include the V40-poly-A site, the tk-poly-A site or the SV40, lacZ or AcMNPV polyhedral polyadenylation signals, which are to be included downstream of the nucleic acid sequence of the invention. Additional regulatory elements may include translational enhancers, Kozak sequences and intervening sequences flanked by donor and acceptor sites for RNA splicing. Moreover, elements such as origin of replication, drug resistance gene or regulators (as part of an inducible promoter) may also be included.

[0050] Nucleic acid molecules encoding said Cas9 protein include DNA, such as cDNA or genomic DNA, and RNA. Preferably, embodiments reciting “RNA” are directed to mRNA.

[0051] It will be readily appreciated by the skilled person that more than one nucleic acid molecule may encode a Cas9 protein in accordance with the present invention due to the degeneracy of the genetic code. Degeneracy results because a triplet code designates 20 amino acids and a stop codon. Because four bases exist which are utilized to encode genetic information, triplet codons are required to produce at least 21 different codes. The possible 4³ possibilities for bases in triplets give 64 possible codons, meaning that some degeneracy must exist. As a result, some amino acids are encoded by more than one triplet, i.e. by up to six. The degeneracy mostly arises from alterations in the third position in a triplet. This means that nucleic acid molecules having different sequences, but still encoding the same Cas9 protein, can be employed in accordance with the present invention.

[0052] The nucleic acid molecules used in accordance with the present invention may be of natural as well as of (semi) synthetic origin. Thus, the nucleic acid molecules may, for example, be nucleic acid molecules that have been synthesised according to conventional protocols of organic chemistry. The person skilled in the art is familiar with the preparation and the use of said probes (see, e.g., Sambrook and Russel “Molecular Cloning, A Laboratory Manual”, Cold Spring Harbor Laboratory, N.Y. (2001)).

[0053] Also in accordance with the present invention, the nucleic acid molecules used in accordance with the invention may be nucleic acid mimicking molecules known in the art such as synthetic or semi-synthetic derivatives of nucleic acid molecules and mixed polymers. They may contain additional non-natural or derivatised nucleotide bases, as will be readily appreciated by those skilled in the art. Nucleic acid mimicking molecules or nucleic acid derivatives according to the invention include, without being limiting, phosphorothioate nucleic acid, phosphoramidate nucleic acid, morpholino nucleic acid, hexitol nucleic acid (HNA), peptide nucleic acid (PNA) and locked nucleic acid (LNA).

[0054] In a second step, step (b), the remaining necessary components of the CRISPR/Cas system are introduced into the cell, namely (b-i) a target sequence specific CRISPR RNA (crRNA) and a trans-activating crRNA (tracr RNA) or a nucleic acid molecule encoding said RNAs; or (b-ii) a chimaeric RNA sequence comprising a target sequence specific crRNA and tracrRNA or a nucleic acid molecule encoding said RNA.

[0055] The term “target sequence specific CRISPR RNA (crRNA)”, as used herein, has been described in the art, e.g. in Makarova et al. (2011). Nat Rev Microbiol 9:467-477; Makarova et al. (2011) Biol Direct 6:38; Bhaya et al. (2011) Annu Rev Genet 45:273-297; Barrangou R, Horvath P (2012) Annu Rev Food Sci Technol 3:143-162; Jinek et al. (2012) Science 337:816-821, Cong et al. (2013). Science 339:819-823; Mali et al. (2013) Science 339: 823-826 or Hwang et al. (2013); Nature Biotechnology doi:10.1038/nbt.2501. crRNAs differ depending on the Cas9 system but typically contain a target sequences of between 21 to 72 nucleotides length, flanked by two direct repeats (DR) of a length of between 21 to 46 nucleotides. In the case of S. pyogenes, the DRs are 36 nucleotides long and the target sequence is 30 nucleotides long (see FIGS. 3C and D, where white arrows indicate the DR sequence and the target sequence is located between these two DRs). The 3′ located DR of the crRNA is complementary to and hybridizes with the corresponding tracr RNA, which in turn binds to the Cas9 protein. As described herein above, the genes encoding the three elements Cas9, tracrRNA and crRNA are typically organized in operon(s).

[0056] The preferred DR sequence for use with the Streptococcus pyogenes Cas9 protein (SEQ ID NO:2 and SEQ ID NO:14) is the sequence shown as SEQ ID NO:16.

[0057] DR sequences functioning together with Cas9 proteins of other bacterial species may be identified by bioinformatic analysis of sequence repeats occurring in the respective Crispr/Cas operons and by experimental binding studies of Cas9 protein and tracrRNA together with putative DR sequence flanked target sequences, as shown by (Deltcheva et al. (2011) Nature 471:602-607).

[0058] As used herein, the term “trans-activating crRNA (tracr RNA)” refers to a small RNA, that is complementary to and base pairs with a pre-crRNA, thereby forming an RNA duplex. This pre-crRNA is then cleaved by an RNA-specific ribonuclease, to form a crRNA/tracrRNA hybrid, which subsequently acts as a guide for the endonuclease Cas9, which cleaves the invading nucleic acid.

[0059] TracrRNAs functioning together with Cas9 proteins of other bacterial species may be identified by differential RNA sequencing, as first described by (Deltcheva et al. (2011) Nature 471:602-607).

[0060] The preferred tracrRNA sequence for use with the Streptococcus pyogenes Cas9 protein (SEQ ID NO:2 and SEQ ID NO:14) is the sequence shown as SEQ ID NO:4.

[0061] Alternatively, a chimaeric RNA sequence comprising such a target sequence specific crRNA and tracrRNA may be employed.

[0062] Such a chimaeric (ch) RNA may be designed by the fusion of a specific target sequence of 20 or more nt with a part or the entire DR sequence (defined as part of a crRNA) with the entire or part of a tracrRNA, as shown by (Jinek et al. Science 337:816-821). Within the chimaeric RNA a segment of the DR and the tracrRNA sequence are complementary able to hybridise and to form a hairpin structure.

[0063] The preferred chimaeric RNA sequence for use with the Streptococcus pyogenes Cas9 protein (SEQ ID NO:2 and SEQ ID NO:14) is the sequence shown as SEQ ID NO:6.

[0064] Moreover, the RNAs in accordance with step (b) may also be encoded by a nucleic acid molecule. The definitions and preferred embodiments recited above with regard to the nucleic acid molecule encoding the Cas9 protein apply mutatis mutandis also to the nucleic acid molecule encoding these RNAs.

[0065] In accordance with the method of the present invention, steps (a) and (b-i) or (b-ii) are either carried out concomitantly, i.e. at the same time or are carried out separately, i.e. at different time points. When the steps are carried out concomitantly, both the Cas9 protein and the RNAs of (b-i) or (b-ii), or nucleic acid molecules encoding same, can be introduced in parallel, for example using two separate injection needles or can be mixed together and, for example, be injected using one needle. When the Cas9 protein is introduced as a protein together with the RNAs of (b-i) or (b-ii), it is particularly preferred that a complex between the protein and the RNAs is formed prior to introduction into the oocyte, and said complex is then introduced into the oocyte, preferably into one or both pronuclei.

[0066] As described herein above, the Cas9 protein introduced in step (a) and the RNA sequence(s) introduced in step (b-i) or (b-ii) form a protein/RNA complex that specifically binds to the target sequence and introduces a single or double strand break within the target sequence.

[0067] In accordance with the present invention, the term “specifically binds to the target sequence” means that the Cas9 protein and tracr/cr/chRNAs are designed such that the complex statistically only binds to a particular sequence and does not bind to an unrelated sequence elsewhere in the genome. Methods for testing the DNA-binding specificity of a Cas9 protein/RNA complex in accordance with the present invention are known to the skilled person and include, without being limiting, transcriptional reporter gene assays and electrophoretic mobility shift assays (EMSA).

[0068] The term “introduces a single or double strand break within the target sequence” relates to the interruption of the DNA strand(s) of a DNA double helix, wherein either one of the two strands (single strand break) or both strands (double strand break) in the double helix are severed.

[0069] The presence of such a single or double strand break within the genomic DNA triggers intracellular repair mechanisms. Typically (but not exclusively), in the case of single strand breaks, such breaks are repaired by homologous recombination, while double strand breaks are typically repaired by either nonhomologous end joining (NHEJ) or homologous recombination.

[0070] Preferably, the binding site of the Cas9 protein/RNA complex in accordance with the invention is up to 500 nucleotides, such as up to 250 nucleotides, up to 100 nucleotides, up to 50 nucleotides, up to 25 nucleotides, up to 10 nucleotides such as up to 5 nucleotides upstream (i.e. 5′) or downstream (i.e. 3′) of the nucleotide(s) that is/are modified in accordance with the present invention.

[0071] In accordance with the present invention it was surprisingly found that it is possible to introduce gene modifications, including targeted gene modifications, into the genome of mammalian oocytes and to achieve an unexpectedly high frequency of homologous recombination of up to 10% by employing a generic Cas9 protein together with either a target specific pair of tracr/crRNA, or chimaeric RNA comprising said pair.

[0072] Performing the cleavage step of the method of the invention will frequently lead to spontaneous genome modifications through nucleotide loss associated with the repair of double strand breaks by nonhomologous end joining (NHEJ) repair. In addition, by providing a nucleic acid molecule comprising a donor nucleic acid sequence and regions homologous to the target sequence, targeted modification of a genome can be achieved with high specificity.

[0073] Several methods are known in the art for achieving an improved frequency of genetic modification. Such methods include, for example, the use of zinc finger or TAL nucleases for achieving homologous recombination.

[0074] However, as discussed herein above, the design and use of zinc finger proteins or TALENs requires considerable efforts and time. Furthermore, neighbouring zinc fingers generally influence each other. Thus, they cannot be simply combined into a larger protein in a combinatorial way in order to enhance sequence specificity. As a consequence, the addition of new zinc fingers to a preselected zinc finger protein requires a laborious screening and selection procedure for each individual step. Further, the incompletely known DNA binding code and the limited resources of coding zinc finger domains further hamper the design of nucleases fused to zinc finger proteins that are specific to any given DNA target sequence. In addition, the nuclease activity of newly derived TALEN pairs can vary more than 10-fold due to yet unknown principles of the TAL peptide DNA recognition (Reyon et al. (2012). Nat Biotechnol 30:460-465). Therefore, the design of specific zinc fingers or TALEN protein pairs is not straight forward and the use of either technique is typically associated with considerable efforts and time.

[0075] Another method employed to achieve a target sequence specific DNA double strand break is the use of yeast derived meganucleases, representing restriction enzymes like I-Scel that binds to specific 18 bp recognition sequence that does not occur naturally in mammalian genomes. However, a combinatorial code for the DNA binding specificity of meganucleases has not yet been revealed. The re-design of the DNA binding domain of meganucleases so far only allowed the substitution of one or a few nucleotides within their natural binding sequence (Pâques and Duchateau, 2007 Curr Gene Ther 7(1): 49-66). Therefore, the choice of meganuclease target sites is limited and it is presently not possible to design new meganucleases that bind to any preferred target region within mammalian genomes. In contrast to these methods, the type II CRISPR-Cas technology solely requires the expression of the generic Cas9 nuclease protein in combination with one short, synthetic chimaeric RNA or two short, synthetic tracr/crRNAs that define the target specificity. Therefore, the CRISPR-Cas technology circumvents the laborious de novo construction of large TALEN proteins and instead requires the less time consuming in vitro transcription of one or two short RNAs, representing a considerable simplification in the generation of target specific single or double strand breaks.

[0076] As discussed herein above, mammalian zygotes could be regarded as a preferred substrate for genome engineering. However, due to the low efficiency of most genome manipulations, only the generation of transgenic mice by pronuclear DNA injection developed into a routine procedure. Further, it was reported that targeted gene manipulation in zygotes was associated not only with low recombination efficiency bit also with a high number of spontaneously occurring, undesired mutations in the targeted allele (Brinster R L, Braun R E, Lo D, Avarbock M R, Oram F, Palmiter R D.; Proc Natl Acad Sci USA 1989; 86:7087-7091). Accordingly, it could have been assumed that the zygotic pronuclei are unfavorable for achieving targeted genetic manipulations.

[0077] Surprisingly it was found in accordance with the present invention that the type II CRISPR-Cas technology can be used to achieve targeted genetic manipulations in non-human, mammalian oocytes.

[0078] Thus, the method of the present invention of introducing genetic modifications into a target genome overcomes the above discussed problems currently faced by the skilled person. In particular, short target specific RNAs can be combined with the generic Cas9 nuclease to form a sequence-specific nuclease complex to generate single or double strand breaks in accordance with the present invention. Accordingly, any sequence of interest can now be targeted in a cost-effective, easy and fast way. Further, it was found in accordance with the present invention that the type II CRISPR-Cas technology can also be employed to achieve targeted genetic manipulations in non-human, mammalian oocytes and to produce a non-human mammal carrying a modified target sequence in its genome.

[0079] In a preferred embodiment, the oocytes are analysed for successful modification of the target genome. Methods for analysing for the presence or absence of a modification are well known in the art and include, without being limiting, assays based on physical separation of nucleic acid molecules, sequencing assays as well as cleavage and digestion assays and DNA analysis by the polymerase chain reaction (PCR).

[0080] Examples for assays based on physical separation of nucleic acid molecules include without limitation MALDI-TOF, denaturating gradient gel electrophoresis and other such methods known in the art, see for example Petersen et al., Hum. Mutat. 20 (2002) 253-259; Hsia et al., Theor. Appl. Genet. 111 (2005) 218-225; Tost and Gut, Clin. Biochem. 35 (2005) 335-350; Palais et al., Anal. Biochem. 346 (2005) 167-175.

[0081] Examples for sequencing assays comprise, without limitation, approaches of sequence analysis by direct sequencing, fluorescent SSCP in an automated DNA sequencer and Pyrosequencing. These procedures are common in the art, see e.g. Adams et al. (Ed.), “Automated DNA Sequencing and Analysis”, Academic Press, 1994; Alphey, “DNA Sequencing: From Experimental Methods to Bioinformatics”, Springer Verlag Publishing, 1997; Ramon et al., J. Transl. Med. 1 (2003) 9; Meng et al., J. Clin. Endocrinol. Metab. 90 (2005) 3419-3422.

[0082] Examples for cleavage and digestion assays include without limitation restriction digestion assays such as restriction fragments length polymorphism assays (RFLP assays), RNase protection assays, assays based on chemical cleavage methods and enzyme mismatch cleavage assays, see e.g. Youil et al., Proc. Natl. Acad. Sci. U.S.A. 92 (1995) 87-91; Todd et al., J. Oral Maxil. Surg. 59 (2001) 660-667; Amar et al., J. Clin. Microbiol. 40 (2002) 446-452.

[0083] Alternatively, instead of analyzing the oocytes for the presence or absence of the desired modification, successfully modified oocytes may be selected by incorporation of appropriate selection markers. Selection markers include positive and negative selection markers, which are well known in the art and routinely employed by the skilled person. Non-limiting examples of selection markers include dhfr, gpt, neomycin, hygromycin, dihydrofolate reductase, G418 or glutamine synthase (GS) (Murphy et al., Biochem J. 1991, 227:277; Bebbington et al., Bio/Technology 1992, 10:169). Using these markers, the oocytes are grown in selective medium and the oocytes with the highest resistance are selected. Also envisaged are combined positive-negative selection markers, which may be incorporated into the target genome by homologous recombination or random integration. After positive selection, the first cassette comprising the positive selection marker flanked by recombinase recognition sites is exchanged by recombinase mediated cassette exchange against a second, marker-less cassette. Clones containing the desired exchange cassette are then obtained by negative selection.

[0084] In a preferred embodiment of the method of the invention, the target sequence is modified by homologous recombination with a donor nucleic acid sequence further comprising the step: (c) introducing a nucleic acid molecule into the cell, wherein the nucleic acid molecule comprises the donor nucleic acid sequence and regions homologous to the target sequence.

[0085] The term “homologous recombination”, as employed herein, is used according to the definitions provided in the art. Thus, it refers to a mechanism of genetic recombination in which two DNA strands comprising similar nucleotide sequences exchange genetic material. Cells use homologous recombination during meiosis, where it serves to rearrange DNA to create an entirely unique set of haploid chromosomes, but also for the repair of damaged DNA, in particular for the repair of single and double strand breaks. The mechanism of homologous recombination is well known to the skilled person and has been described, for example by Paques and Haber (Paques F, Haber J E.; Microbiol Mol Biol Rev 1999; 63:349-404)

[0086] In accordance with the present invention, the term “donor nucleic acid sequence” refers to a nucleic acid sequence that serves as a template in the process of homologous recombination and that carries the modification that is to be introduced into the target sequence. By using this donor nucleic acid sequence as a template, the genetic information, including the modifications, is copied into the target sequence within the genome of the oocyte. In non-limiting examples, the donor nucleic acid sequence can be essentially identical to the part of the target sequence to be replaced, with the exception of one nucleotide which differs and results in the introduction of a point mutation upon homologous recombination or it can consist of an additional gene previously not present in the target sequence. The donor nucleic acid sequence may be a double stranded nucleic acid sequence or a single-stranded nucleic acid molecule.

[0087] In accordance with the method of the present invention of producing a non-human, mammalian oocyte carrying a modified target sequence in its genome, the nucleic acid molecule introduced into the cell in step (c) comprises the donor nucleic acid sequence as defined above as well as additional regions that are homologous to the target sequence, or to parts of the target sequence.

[0088] The term “regions homologous to the target sequence” (also referred to as “homology arms” herein), in accordance with the present invention, refers to regions having sufficient sequence identity to ensure specific binding to the target sequence. Methods to evaluate the identity level between two nucleic acid sequences are well known in the art. For example, the sequences can be aligned electronically using suitable computer programs known in the art. Such programs comprise BLAST (Altschul et al. (1990) J. Mol. Biol. 215, 403), variants thereof such as WU-BLAST (Altschul and Gish (1996) Methods Enzymol. 266, 460), FASTA (Pearson and Lipman (1988) Proc. Natl. Acad. Sci. USA 85, 2444) or implementations of the Smith-Waterman algorithm (SSEARCH, Smith and Waterman (1981) J. Mol. Biol., 147, 195). These programs, in addition to providing a pairwise sequence alignment, also report the sequence identity level (usually in percent identity) and the probability for the occurrence of the alignment by chance (P-value). In accordance with the present invention it is preferred that BLAST is used to determine the identify level between two nucleic acid sequences.

[0089] Preferably, the “regions homologous to the target sequence” have a sequence identity with the corresponding part of the target sequence of at least 95%, more preferred at least 97%, more preferred at least 98%, more preferred at least 99%, even more preferred at least 99.9% and most preferred 100%. The above defined sequence identities are defined only with respect to those parts of the target sequence which serve as binding sites for the homology arms. Thus, the overall sequence identity between the entire target sequence and the homologous regions of the nucleic acid molecule of step (c) of the method of the present invention can differ from the above defined sequence identities, due to the presence of the part of the target sequence which is to be replaced by the donor nucleic acid sequence. It is preferred that at least two regions homologous to the target sequence are present in the nucleic acid molecule of (c).

[0090] In accordance with this preferred embodiment of the method of the present invention, steps (a) and (b-i) or (b-ii) as well as step (c) are either carried out concomitantly, i.e. at the same time or are carried out at different time points. For example, all three steps can be carried out concomitantly, for example using three separate injection needles or in form of a mixture that is injected using one needle. Alternatively, steps (a) and (b-i)/(b-ii) can be carried out concomitantly, while step (c) is carried out at a different (earlier or later) time point. Also, step (c) may be carried out concomitantly with step (a) and step (b-i)/(b-ii) is carried out at a different (earlier or later) time point. Furthermore, step (c) may also be carried out concomitantly with step (b-i)/(b-ii) while step (a) is carried out at a different (earlier or later) time point.

[0091] Accordingly, it will also be appreciated by one of skill in the art that the nucleic acid molecule to be introduced into the cell in step (c) and a nucleic acid molecule encoding the Cas9 protein and/or a nucleic acid molecule encoding the RNAs of step (b-i) or (b-ii) may be comprised in one nucleic acid sequence, for example in one vector or plasmid. Alternatively, the nucleic acid molecule of step (c) may be a further nucleic acid molecule, to be introduced in addition to the nucleic acid molecule(s) in accordance with step (a) and/or (b-i) or (b-ii).

[0092] In a more preferred embodiment of the method of the invention, the nucleic acid molecule of step (c) is a single stranded oligodesoxynucleotide.

[0093] The term “oligodesoxynucleotide (ODN)” relates to a nucleic acid polymer made up of a sequence of desoxynucleotide residues. An ODN in accordance with the present invention refers to both oligodesoxynucleotides and polydesoxynucleotides and is at least 30 nucleotides in length, such as e.g. at least 40 nucleotides in length, e.g. at least 50 nucleotides in length, such as e.g. at least 60 nucleotides in length, more preferably at least 70 nucleotides in length, such as e.g. at least 80 nucleotides in length, e.g. at least 90 nucleotides in length and even more preferably at least 100 nucleotides in length, such as e.g. at least 110 nucleotides in length, e.g. at least 120 nucleotides in length, e.g. at least 130 nucleotides in length, such as at least 140 nucleotides in length and most preferably at least 150 nucleotides in length. It is further preferred that the ODN in accordance with the present invention is less than 500 nucleotides in length, such as e.g. less than 400 nucleotides in length, e.g. less than 300 nucleotides in length and most preferably less than 200 nucleotides in length.

[0094] Moreover, the oligodesoxynucleotide in accordance with this preferred embodiment is a single-strand ODN (ssODN), i.e. it is not hybridised with a second, different (i.e. complementary or partially complementary) oligonucleotide strand. Nonetheless, it will be appreciated that the ssODN may fold back onto itself, thus forming a partial or complete double stranded molecule consisting of one oligodesoxynucleotide strand. Preferably, the ssODN in accordance with this preferred embodiment does not fold back to form a partial or complete double stranded molecule but instead is single-stranded over its entire length.

[0095] In another preferred embodiment of the method of the invention, the oocyte is a fertilised oocyte.

[0096] In a further preferred embodiment of the method of the invention, the Cas9 protein or the nucleic acid molecule encoding same and/or the RNA of (b-i) or (b-ii) or the nucleic acid molecule encoding said RNA is/are introduced into the oocyte by microinjection.

[0097] Microinjection into the oocyte can be carried out by injection into the nucleus (before fertilisation), the maternal and/or paternal pronucleus (after fertilisation) and/or by injection into the cytoplasm (both before and after fertilisation). When a fertilised oocyte is employed, injection into the pronucleus is carried out either for one pronucleus or for both pronuclei. Preferably, for injection into only one of the pronuclei, the paternal pronucleus is chosen due to its bigger size.

[0098] Injection of the Cas9 protein of step (a) or of the RNA of step (b-i) or (b-ii) is preferably into the cytoplasm, while injection of a nucleic acid molecule encoding said protein or RNA is preferably into the nucleus/pronucleus, in the case of fertilized oocytes preferably into both pronuclei. It is more preferred that the microinjection is carried out by injection into both the nucleus/pronucleus and the cytoplasm. For example, the needle can be introduced into the nucleus/pronucleus and a first amount of the Cas9 protein of step (a) and/or of the RNA of step (b-i) or (b-ii) and/or of a nucleic acid molecule encoding same are injected into the nucleus/pronucleus. While removing the needle from the oocyte, a second amount of the Cas9 protein of step (a) and/or of the RNA of step (b-i) or (b-ii) and/or of a nucleic acid molecule encoding same is injected into the cytoplasm. When a nucleic acid molecule that needs to be present in the nucleus/pronucleus, such as e.g. a DNA molecule encoding the Cas9 protein, is injected into the cytoplasm, then said nucleic acid molecule should comprise a nuclear localisation signal to ensure delivery into the nucleus/pronucleus.

[0099] Methods for carrying out microinjection are well known in the art and are described for example in Nagy et al. (Nagy A, Gertsenstein M, Vintersten K, Behringer R., 2003. Manipulating the Mouse Embryo. Cold Spring Harbour, N.Y.: Cold Spring Harbour Laboratory Press) as well as in the examples herein below.

[0100] In another preferred embodiment of the method of the invention, the nucleic acid molecule of step (c) is introduced into the oocyte by microinjection.

[0101] Injection of the nucleic acid molecule of step (c) is preferably into the nucleus/pronucleus. However, injection of the nucleic acid molecule of step (c) can also be carried out into the cytoplasm when said nucleic acid molecule is provided as a nucleic acid sequence having a nuclear localisation signal, as mentioned above.

[0102] In another preferred embodiment of the method of the invention, the nucleic acid molecule encoding the Cas9 protein is mRNA.

[0103] In a further preferred embodiment of the method of the invention, the Cas9 protein has an amino acid sequence as shown in SEQ ID NO:2.

[0104] The amino acid sequence of SEQ ID NO:2 represents a Cas9 protein derived from Streptococcus pyogenes.

[0105] In another preferred embodiment of the method of the invention, the regions homologous to the target sequence are localised at the 5′ and 3′ ends of the donor nucleic acid sequence.

[0106] In this preferred embodiment, the donor nucleic acid sequence is flanked by the two regions homologous to the target sequence such that the nucleic acid molecule used in the method of the present invention consists of a first region homologous to the target sequence, followed by the donor nucleic acid sequence and then a second region homologous to the target sequence.

[0107] In a further preferred embodiment of the method of the invention, the regions homologous to the target sequence comprised in the nucleic acid molecule of (c) have a length of at least 400 bp. More preferably, the regions each have a length of at least 500 nucleotides, such as at least 600 nucleotides, at least 750 bp nucleotides, more preferably at least 1000 nucleotides, such as at least 1500 nucleotides, even more preferably at least 2000 nucleotides and most preferably at least 2500 nucleotides. It will be appreciated that these minimum lengths refer to the lengths of each of the homologous regions present in the nucleic acid molecule of (c), i.e. where two homologous regions are present, each homologous independently has a length of at least 400 bp, 500 bp etc., wherein the homologous regions may have the same or different lengths, as long as they each have the recited minimum length. The maximum length of the regions homologous to the target sequence comprised in the nucleic acid molecule depends on the type of cloning vector used and can usually be up to a length 20.000 nucleotides each in E. coli high copy plasmids using the col EI replication origin (e.g. pBluescript) or up to a length of 300.000 nucleotides each in plasmids using the F-factor origin (e.g. in BAC vectors such as for example pTARBAC1).

[0108] In a further preferred embodiment of the method of the invention, the modification of the target sequence is selected from the group consisting of substitution, insertion and deletion of at least one nucleotide of the target sequence. Preferred in accordance with the present invention are substitutions, for example substitutions of 1 to 3 nucleotides and insertions of exogenous sequences, such as loxP sites (34 nucleotides long) or cDNAs, such as for example for reporter genes. Such cDNAs for reporter genes can, for example, be up to 6 kb long. Depending on the purpose of the modification, the modifications should be in frame or should lead to a frame shift. The person skilled in the art would know how to ensure that the reading frame is maintained or shifted and would also be aware which alternative is desirable in a particular case.

[0109] In another preferred embodiment of the method of the invention, the oocyte is from a non-human mammal selected from the group consisting of rodents, dogs, felids, primates, rabbits, pigs, and ruminants.

[0110] All of the mammals, avians and fish described herein are taxonomically defined in accordance with the prior art and the common general knowledge of the skilled person.

[0111] Non-limiting examples of “rodents” are mice, rats, squirrels, chipmunks, gophers, porcupines, beavers, hamsters, gerbils, guinea pigs, degus, chinchillas, prairie dogs, and groundhogs.

[0112] Non-limiting examples of “dogs” include members of the subspecies canis lupus familiaris as well as wolves, foxes, jackals, and coyotes.

[0113] Non-limiting examples of “felides” include members of the two subfamilies: the pantherinae, including lions, tigers, jaguars and leopards and the felinae, including cougars, cheetahs, servals, lynxes, caracals, ocelots and domestic cats.

[0114] The term “primates”, as used herein, refers to all monkeys including for example cercopithecoid (old world monkey) or platyrrhine (new world monkey) as well as lemurs, tarsiers, apes and marmosets (Callithrix jacchus).

[0115] The present invention also relates to a method of producing a non-human mammal carrying a modified target sequence in its genome, the method comprising: (a) producing an oocyte in accordance with any one of claims 1 to 12; (b) transferring the oocyte obtained in (a) to a pseudopregnant female host; and (c) analysing the offspring delivered by the female host for the presence of the modification.

[0116] In accordance with the present invention, the term “transferring the oocyte obtained in (a) to a pseudopregnant female host” includes the transfer of a fertilised oocyte but also the transfer of pre-implantation embryos of for example the 2-cell, 4-cell, 8-cell, 16-cell and blastocyst (70- to 100-cell) stage. Said pre-implantation embryos can be obtained by culturing the oocyte under appropriate conditions for it to develop into a pre-implantation embryo. Furthermore, the oocyte may be injected into a blastocyst or fused with a blastocyst in order to obtaining a pre-implantation embryo. Methods of introducing an oocyte into a blastocyst as well as methods for transferring an oocyte or pre-implantation embryo to a pseudo-pregnant female host are well known in the art and are, for example, described in Nagy et al., (Nagy A, Gertsenstein M, Vintersten K, Behringer R., 2003. Manipulating the Mouse Embryo. Cold Spring Harbour, N.Y.: Cold Spring Harbour Laboratory Press).

[0117] It is further envisaged in accordance with the method of producing a non-human mammal carrying a modified target sequence in its genome that a step of analysis of successful genomic modification is carried out before transplantation into the female host. As a non-limiting example, the oocyte can be cultured to the 2-cell, 4-cell or 8-cell stage and one cell can be removed without destroying or altering the resulting embryo. Analysis for the genomic constitution, e.g. the presence or absence of the genomic modification, can then be carried out using for example PCR or southern blotting techniques or any of the methods described herein above. Such methods of analysis of successful genotyping prior to transplantation are known in the art and are described, for example in Peippo et al. (Peippo J, Viitala S, Virta J, Raty M, Tammiranta N, Lamminen T, Aro J, Myllymaki H, Vilkki J.; Mol Reprod Dev 2007; 74:1373-1378).

[0118] For this method of producing a non-human mammal, fertilisation of the oocyte is required. Said fertilisation can occur before the modification of the target sequence in step (a) in accordance with the method of producing a non-human vertebrate or mammal of the invention, i.e. a fertilised oocyte can be used for the method of modifying a target sequence in accordance with the invention. The fertilisation can also be carried out after the modification of the target sequence in step (a), i.e. a non-fertilised oocyte can be used for the method of modifying a target sequence in accordance with the invention, wherein the oocyte is subsequently fertilised before transfer into the pseudopregnant female host.

[0119] The step of analysing for the presence of the modification in the offspring delivered by the female host provides the necessary information whether or not the produced non-human mammal carries the modified target sequence in its genome. Thus, the presence of the modification is indicative of said offspring carrying a modified target sequence in its genome whereas the absence of the modification is indicative of said offspring not carrying the modified target sequence in its genome. Methods for analysing for the presence or absence of a modification have been detailed above. Those offspring carrying the modified target sequence in their genome can then be further bred in order to determine whether the introduced modification is passed on to offspring via germline transmission. Those mammals in which germline transmission of the modification is successful can then be used for further breeding.

[0120] The non-human mammal produced by the method of the invention is, inter alia, useful to study the function of genes of interest and the phenotypic expression/outcome of modifications of the genome in such animals. It is furthermore envisaged that the non-human mammals of the invention can be employed as disease models for human familial amyotrophic lateral sclerosis, frontotemporal demential, Parkinson's disease, Alzheimer's disease and any other genetically caused diseases and for testing therapeutic agents/compositions. Furthermore, the non-human mammal of the invention can also be used for livestock breeding.

[0121] In a preferred embodiment of this method of the invention of producing a non-human mammal, the non-human mammal is selected from the group consisting of rodents, dogs, felids, primates, rabbits, pigs and ruminants.

[0122] The present invention further relates to a non-human mammalian animal obtainable by the above described method of the invention.

[0123] All the definitions and preferred embodiments defined above with regard to the method of the invention of producing a non-human, mammalian oocyte carrying a modified target sequence in its genome apply mutatis mutandis also to this method of the invention of producing a non-human mammal.

### BRIEF DESCRIPTION OF THE DRAWINGS

[0124] The figures show:

[0125] FIG. 1: Schematic outline of Crispr/Cas9-mediated germline modification of mice. An exemplary workflow of Crispr/Cas9-mediated, embryo based gene targeting is shown which starts with the microinjection of Cas9 mRNA, tracrRNA, crRNA, and optionally, of a synthetic, mutagenic oligodeoxynucleotide (ODN), into one or both pronuclei of one-cell embryos isolated from donor females. Upon translation, the Cas9 protein is imported into the pronuclei and creates together with the crRNA and tracrRNA a (single or) double strand break (DSB) in the target gene of the paternal and maternal genome (FIG. 2). The DSBs are either processed by error-prone NHEJ repair (possible in both paternal and maternal genomes), or are repaired by homologous recombination in those cases and genomes into which a mutagenic ODN has been introducted. Upon transfer of the microinjected embryos into foster females, the offspring derived is genotyped by PCR as well as sequence analysis to identify founder animals that harbor targeted or knockout mutations in their germline. The mating of such founders to wildtype mice produces heterozygous mutants that are intercrossed to obtain homozygote mutants.

[0126] FIG. 2: Crisp/Cas9-mediated gene editing in pronuclei of microinjected one-cell embryos. Double-strand breaks (DSBs) induced by Cas9, crRNA and tracrRNA enhance DNA repair at the target site by several orders of magnitude. DSBs may be repaired by the homologous recombination (HR) pathway using a synthetic oligonucleotide or a gene targeting vector as repair template, that contain a desired genetic modification flanked with sequence homology regions. In the recombination process, gene conversion extends from the vector's homology regions into the heterologous sequence and transfers the modification into the genome (targeted allele). Alternatively, DSBs can be closed by the non-homologous end joining (NHEJ) pathway that re-ligates the open DNA ends without repair templates. By this means, DNA ends are frequently edited through loss of multiple nucleotides causing in many cases frameshift (knockout) mutations within coding regions.

[0127] FIG. 3: DNA constructs of the invention for the production of Cas9 mRNA, tracrRNA, crRNAs and chRNAs. (a) Plasmid pCAG-Cas9-bpA contains a T7 RNA polymerase promoter upstream of a codon-optimized coding region of Cas9 from the Streptococcus pyogenes type II CRISPR locus, modified by the addition of N- and C-terminal nuclear localisation sequences (NLS) and a FLAG tag, followed by a MluI restriction site for linearization. (b) Plasmid pT7-tracrRNA contains a T7 promoter upstream of the indicated sequence enabling the in vitro transcription of the 89 nucleotide tracrRNA. (c) Plasmid pT7-crRNA-Rab38 contains a T7 promoter upstream of the indicated 102 nucleotide sequence, enabling the in vitro transcription of crRNA-Rab38 that includes a 30 nt target sequence from exon 1 of the mouse Rab38 gene, flanked by two 36 nt direct repeat (DR) sequences from the Streptococcus pyogenes type II CRISPR locus. (d) Plasmid pT7-crRNA-Fus contains a T7 promoter upstream of the indicated 102 nucleotide sequence, enabling the in vitro transcription of crRNA-Fus that includes a 30 nt target sequence from exon 15 of the mouse Fus gene, flanked by two 36 nt DR sequences from the Streptococcus pyogenes type II CRISPR locus. (e) Plasmid pT7-chRNA-Rab38 contains a T7 promoter upstream of the indicated 103 nucleotide sequence, enabling the in vitro transcription of chRNA-Rab38 that includes a 20 nt target sequence from exon 1 of the mouse Rab38 gene and a chimaeric RNA sequence derived from the crRNA (c) and tracr RNA (b). (f) Plasmid pT7-chRNA-Fus contains a T7 promoter upstream of the indicated 103 nucleotide sequence, enabling the in vitro transcription of chRNA-Fus that includes a 20 nt target sequence from exon 15 of the mouse Fus gene and a chimaeric RNA sequence derived from the crRNA (c) and tracr RNA (b).

[0128] FIG. 4. Targeted mutations in the murine Rab38 and Fus genes. (a) Codons 1-23 of the mouse Rab38 gene. (b) Using the mutagenic oligodeoxynucleotide ODN-Rab38 (G19V) as repair template for Cas9, tracrRNA/crRNA-Rab38 or chRNA-Rab38 (FIG. 3) induced double-strand breaks within the indicated target region in one-cell embryos, a glycine to valine replacement and a SexAI site are created at codon 19. (c) Codons of exon15 of the mouse Fus gene. (d) Using the mutagenic oligodeoxynucleotide ODN-Fus (R513G) as repair template for Cas9, tracrRNA/crRNA-Fus or chRNA-Fus (FIG. 3) induced double-strand breaks within the indicated target region in one-cell embryos, an arginine to glycine replacement and a BccI site are created at codon 513.

[0129] The examples illustrate the invention.

### EXAMPLE 1

### Generation of Knockout and Knockin Mutations in the Rab38 and Fus Genes by Cas9, and tracrRNA/crRNAs or chRNAs in Mouse One-Cell Embryos

[0130] The workflow of Crispr/Cas9-mediated, embryo based gene targeting with the microinjection of Cas9 mRNA, tracrRNA/crRNA or chimaericRNA (chRNA) and optional, of a synthetic oligodeoxynucleotide (ODN), into the paternal pronucleus of one-cell embryos isolated from donor females. Upon translation, the Cas9 nuclease protein is imported into the pronuclei and creates together with the target specific crRNA and generic tracrRNA or with the target specific chRNA, a double strand break in the target gene of the paternal and maternal genome (FIG. 1). In the paternal genome, DSBs are sealed either by homologous recombination with the mutagenic ODN or become processed in both genomes by error-prone NHEJ repair, creating knockin or knockout alleles (FIG. 2). Upon transfer of the microinjected embryos into foster females, the offspring derived is genotyped by PCR and sequence analysis to identify founder animals that harbor targeted or knockout mutations in their germline. The mating of such founders to wildtype mice produces heterozygous mutants that are intercrossed to obtain homozygote mutants.

[0131] As proof of this principle, the Rab38 gene was targeted to create a glycine-to-valine missense mutation at codon 19 (G19V), as found in the Rab38^{cht} allele of chocolate mutants (Loftus et al. (2002) Proc Natl Acad Sci USA 99:4471-4476). The Rab38 gene encodes a small GTPase that regulates intracellular vesicle trafficking in melanocytes, retinal pigment epithelial cells, alveolar pneumocytes and platelets (Wasmeier et al. (2006) J Cell Biol 175:271-281). Mutant chocolate mice (Rab38^{cht}) exhibit a missense and ruby rats a nonsense mutation within Rab38 and are considered to be phenotypic models of Hermansky-Pudlak syndrome; a disease characterized by oculocutaneous albinism (OCA), progressive pulmonary fibrosis and platelet storage disease (Oiso et al. (2004) Mamm Genome 15:307-314; Di Pietro et al. (2005) Traffic 6:525-33; Lopes V S et al. (2007). Mol Biol Cell 18:3914-3927; Osanai et al. (2010) Am J Physiol Lung Cell Mol Physiol 298:L243-251).

[0132] As targeting molecule a synthetic, single-stranded oligodeoxynucleotide ODN-Rab38(G19V) of 144 nucleotides (SEQ ID NO:1) was used that covers 47 bp of the lagging strand sequence upstream of codon 19 and 94 bp of downstream sequence. ODN-Rab38 (G19V) includes a G to T replacement at the second position of codon 19, creating a valine triplet and a SexAI restriction site, and a silent T to A exchange as an unique identifier of the targeted Rab38 allele (FIG. 4).

[0133] ODN-Rab38 (G19V) was microinjected together with Cas9 mRNA coding for a modified Cas9 protein (SEQ ID NO:2), transcribed from pCAG-Cas9-bpA (SEQ ID NO:3), and tracrRNA, transcribed from pT7-tracr-RNA (SEQ ID NO:4) and crRNA-Rab38, transcribed from pT7-crRNA-Rab38 (SEQ ID NO:5), or together with Cas9 mRNA and chRNA-Rab38 (SEQ ID NO:6) (FIG. 3) into one-cell mouse embryos (FIG. 1). The resulting offspring was analysed for gene editing events by PCR amplification of a 213 bp region covering the first exon of Rab38 from genomic tail DNA.

[0134] Founder mice harbouring the G19V replacement were initially identified by the digestion of PCR products with SexAI. The presence of digested PCR products identified a substantial fraction of the pups derived from microinjections of both, crRNA-Rab38/tracrRNA and chRNA-Rab38, as recombined founders. Subsequently, undigested PCR products from such founders were subcloned and 10 subclones analysed by sequencing. This analysis revealed the presence of Rab38 alleles harboring the G19V replacement but also of knockout alleles that lost a variable number of nucleotides due to NHEJ repair. By further breeding of such founder mice the mutant Rab38 alleles can be transferred via the germ line and enable the establishment of mutant mouse lines.

[0135] Furthermore, the Fus gene was targeted to create an arginine-to-glycine missense mutation at codon 513 (R513G), as found in the mutant Fus alleles of familial amyotrophic lateral sclerosis (ALS) patients, causing the loss of motor neurons and the nuclear and cytoplasmic aggregation of FUS. FUS is a nucleoprotein that functions in regulation of transcription, splicing, and RNA export. The majority of mutations occur in the C-terminal tail harboring a nuclear localization signal, such that Fus R513G mouse mutants provide a disease model for familial ALS (Van Langenhove et al. (2012) Ann Med 44:817-828; Fiesel F C, Kahle P J (2011) TDP FEBS J 278:3550-3568).

[0136] As targeting molecule, a synthetic, single-stranded oligodeoxynucleotide ODN-Fus(R513G) of 140 nucleotides (Seq ID NO:7) was used that covers exon 15 of the mouse Fus gene. ODN-Fus-(R513G) includes a C to G replacement at the first position of codon 513, creating a glycine triplet and a BccI restriction site (FIG. 4). ODN-Fus (R513G) was microinjected together with Cas9 mRNA coding for a modified Cas9 protein in (SEQ ID NO:2), transcribed from pCAG-Cas9-bpA (SEQ ID NO:3), and tracrRNA, transcribed from pT7-tracr-RNA (SEQ ID NO:4) and crRNA-Fus, transcribed from pT7-crRNA-Fus (SEQ ID NO:8), or together with Cas9 mRNA and chRNA-Fus (SEQ ID NO:9) (FIG. 3) into one-cell mouse embryos (FIG. 1). The resulting offspring was analysed for gene editing events by PCR amplification of a 576 bp region covering exon 15 of Fus from genomic tail DNA. Founder mice harbouring the R513G replacement were initially identified by the digestion of PCR products with BccI. The presence of digested PCR products identified a substantial fraction of the pups derived from microinjections of both, crRNA-Fus/tracrRNA and chRNA-Fus, as recombined founders. Subsequently, undigested PCR products from such founders were subcloned and 10 subclones analysed by sequencing. This analysis revealed the presence of Fus alleles harboring the R513G replacement but also of knockout alleles that lost a variable number of nucleotides due to NHEJ repair. By further breeding of such founder mice the mutant Fus alleles can be transferred via the germ line and enable the establishment of mutant mouse lines.

[0137] Methods

[0138] Plasmid Constructions

[0139] DNA constructs pT7-tracrRNA, pT7-crRNA-Rab38, pT7crRNA-Fus, pT7chRNA-Rab38 and pT7-chRNA-Fus for the in vitro transcription of short RNAs (FIG. 3) were obtained by DNA synthesis (Genscript, Piscataway, USA), cloned into plasmid pUC57. crRNAs were designed to recognize target sequences in genomic sequences that are located upstream of the Streptococcus pyogenes SF370 type II CRISPR locus PAM sequence “NGG”. Plasmid pCAG-Cas9-bpA (SEQ ID NO:3) was constructed by ligation of a PacI-MluI fragment containing a synthetic Cas9 coding region (Genscript, Piscataway, USA) into the corresponding sites of plasmid pCAG-venus-MluI. Plasmid pCAG-Cas9-bpA contains a T7 RNA polymerase promoter upstream of a codon-optimized coding region of Cas9 from the Streptococcus pyogenes type II CRISPR locus, modified by the addition of N- and C-terminal nuclear localisation sequences (NLS) and a FLAG tag, followed by a MluI restriction site for linearization. Plasmid pT7-tracrRNA (SEQ ID NO:4) contains a T7 promoter upstream of the indicated sequence enabling the in vitro transcription of the 89 nucleotide tracrRNA. Plasmid pT7-crRNA-Rab38 (SEQ ID NO:5) contains a T7 promoter upstream of the indicated 102 nucleotide sequence, enabling the in vitro transcription of crRNA-Rab38 that includes a 30 nt target sequence from exon 1 of the mouse Rab38 gene, flanked by two 36 nt direct repeat (DR) sequences from the Streptococcus pyogenes type II CRISPR locus. Plasmid pT7-crRNA-Fus (SEQ ID NO:8) contains a T7 promoter upstream of the indicated 102 nucleotide sequence, enabling the in vitro transcription of crRNA-Fus that includes a 30 nt target sequence from exon 15 of the mouse Fus gene, flanked by two 36 nt DR sequences from the Streptococcus pyogenes type II CRISPR locus. Plasmid pT7-chRNA-Rab38 (SEQ ID NO:6) contains a T7 promoter upstream of the indicated 103 nucleotide sequence, enabling the in vitro transcription of chRNA-Rab38 that includes a 20 nt target sequence from exon 1 of the mouse Rab38 gene and a chimaeric RNA sequence derived from the crRNA and tracr RNA (FIG. 3). Plasmid pT7-chRNA-Fus (SEQ ID NO:9) contains a T7 promoter upstream of the indicated 103 nucleotide sequence, enabling the in vitro transcription of chRNA-Fus that includes a 20 nt target sequence from exon 15 of the mouse Fus gene and a chimaeric RNA sequence derived from the crRNA and tracr RNA (FIG. 3).

[0140] Microinjection of One-Cell Embryos

[0141] The injection of Cas9 mRNA, of tracrRNA/crRNA or chRNAs and targeting ODNs was performed as previously described for ZFNs (Meyer et al. (2010) Proc Natl Acad Sci USA 107:15022-6; Meyer et al. (2012) Proc Natl Acad Sci USA 109:9354-9359). Briefly, Cas9 mRNA (including polyadenylation), tracrRNA/crRNA or chRNAs (without polyadenylation) are prepared by in vitro transcription from plasmid DNA, linearized at the end of the transcribed region with MluI (Cas9) or AlwI (RNAs), using the mMessage mMachine T7 Ultra kit and the MEGAclear kit (Life Technologies, Carlsbad, USA). Each of the RNAs was then diluted into injection buffer (10 mM Tris, 0.1 mM EDTA, pH7.2) to a working concentration of 20 ng/μl. The targeting oligodeoxynucleotides (Metabion, Martinsried, Germany) were in injection buffer and diluted to a working concentration of 30 ng/μl. Appropriate RNAs were mixed with the respective mutagenic oligodesoxynucleotide and stored at −80° C. One-cell embryos were obtained by mating of C57BL/6N males with super-ovulated FVB females (Charles River, Sulzbach, Germany). For super-ovulation three-week old FVB females are treated with 2.5 IU pregnant mares serum (PMS) 2 days before mating and with 2.5 IU Human chorionic gonadotropin (hCG) at the day of mating. Fertilised oocytes were isolated from the oviducts of plug positive females and microinjected in M2 medium (Sigma-Aldrich Inc Cat. No. M7167) following standard procedures (Nagy A, Gertsenstein M, Vintersten K, Behringer R., 2003. Manipulating the Mouse Embryo. Cold Spring Harbour, N.Y.: Cold Spring Harbour Laboratory Press). Embryos were injected with the mixture of the targeting ODN and the RNAs in a two-step procedure, as described (Meyer et al. (2010) Proc Natl Acad Sci USA 107:15022-6; Meyer et al. (2012) Proc Natl Acad Sci USA 109:9354-9359). Briefly, a first aliquot of the DNA/RNA mixture was injected into, whenever possible, the larger (male) pronucleus to deliver the DNA vector, as used for the production of transgenic mice. Upon the withdrawal of the injection needle from the pronucleus a second aliquot of the DNA/RNA mixture was injected into the cytoplasm to deliver the Cas9 mRNAs directly to the translation machinery. Injections were performed using a Leica micromanipulator and microscope and an Eppendorf FemtoJet injection device. Injected zygotes were transferred into pseudopregnant CD1 female mice and viable adult mice were obtained.

[0142] Genotying of Founder Mice

[0143] Genomic DNA was isolated from tail tips of mice derived from microinjections, following the Wizard Genomic DNA Purification Kit (Promega) protocol. The obtained DNA pellet was dissolved in 100 μl 10 mM Tris-Cl, pH 8.5, incubated over night at room temperature and stored for further analysis at 4° C. To analyze founders for mutations in the Rab38 gene, exon was amplified using the PCR primer pair Rab-for (SEQ ID NO:10) (5′-GGCCTCCAGGATGCAGACACC-3′) and Rab-rev (SEQ ID NO:11) (5′-CCAGCAATGTCCCAGAGCTGC-3′). Amplification was performed using Herculase II polymerase (Agilent Technologies) in 25 μl reactions with 30 cycles of 95° C.—20 s, 60° C.—15 s, 72° C.—15 s. Afterwards, the PCR products were directly digested with 10 U of SexAI and analyzed on agarose gels. Undigested products from positively identified founders were purified with the Qiaquick PCR purification Kit (Qiagen), cloned into pSC-B (Stratagene, La Jolla, USA) and sequenced. The results were compared to the genomic Rab38 sequences using the Vector NTI software (Invitrogen).

[0144] To analyze founders for mutations in the Fus gene, exon 15 was amplified using the PCR primer pair Fus-for (SEQ ID NO:12) and Fus-rev (SEQ ID NO:13). Amplification was performed using Herculase II polymerase (Agilent Technologies) in 25 μl reactions with 30 cycles of 95° C.—20 s, 60° C.—15 s, 72° C.—15 s. Afterwards, the PCR products were directly digested with 10 U of BccI and analyzed on agarose gels. Undigested products from positively identified founders were purified with the Qiaquick PCR purification Kit (Qiagen), cloned into pSC-B (Stratagene, La Jolla, USA) and sequenced. The results were compared to the genomic Fus sequences using the Vector NTI software (Invitrogen).

The application's sequence listing, which the Patent Office published only in electronic form, follows.

SEQUENCE LISTING (81 sequences)

SEQ ID NO: 1 - DNA, 144 bp, Artificial sequence
  /note="Description of artificial sequence: Oligodeoxynucleotide ODN-Rab38(G19V)"
cacctcacaaggagcacctgtacaagctgctggtgatcggcgacctggtagtgggcaagaccagcattattaaacggtacgtgcatcaaaatttctcctctcattatcgagccaccattggtgtggacttcgcgctgaaggtgc

SEQ ID NO: 2 - protein, 1411 aa, Artificial sequence
  /note="Description of artificial sequence: modified Cas9 protein"
MGPKKKRKVAAADYKDDDDKGIHGVPAADKKYSIGLDIGTNSVGWAVITDEYKVPSKKFKVLGNTDRHSIKKNLIGALLFDSGETAEATRLKRTARRRYTRRKNRICYLQEIFSNEMAKVDDSFFHRLEESFLVEEDKKHERHPIFGNIVDEVAYHEKYPTIYHLRKKLVDSTDKADLRLIYLALAHMIKFRGHFLIEGDLNPDNSDVDKLFIQLVQTYNQLFEENPINASGVDAKAILSARLSKSRRLENLIAQLPGEKKNGLFGNLIALSLGLTPNFKSNFDLAEDAKLQLSKDTYDDDLDNLLAQIGDQYADLFLAAKNLSDAILLSDILRVNTEITKAPLSASMIKRYDEHHQDLTLLKALVRQQLPEKYKEIFFDQSKNGYAGYIDGGASQEEFYKFIKPILEKMDGTEELLVKLNREDLLRKQRTFDNGSIPHQIHLGELHAILRRQEDFYPFLKDNREKIEKILTFRIPYYVGPLARGNSRFAWMTRKSEETITPWNFEEVVDKGASAQSFIERMTNFDKNLPNEKVLPKHSLLYEYFTVYNELTKVKYVTEGMRKPAFLSGEQKKAIVDLLFKTNRKVTVKQLKEDYFKKIECFDSVEISGVEDRFNASLGTYHDLLKIIKDKDFLDNEENEDILEDIVLTLTLFEDREMIEERLKTYAHLFDDKVMKQLKRRRYTGWGRLSRKLINGIRDKQSGKTILDFLKSDGFANRNFMQLIHDDSLTFKEDIQKAQVSGQGDSLHEHIANLAGSPAIKKGILQTVKVVDELVKVMGRHKPENIVIEMARENQTTQKGQKNSRERMKRIEEGIKELGSQILKEHPVENTQLQNEKLYLYYLQNGRDMYVDQELDINRLSDYDVDHIVPQSFLKDDSIDNKVLTRSDKNRGKSDNVPSEEVVKKMKNYWRQLLNAKLITQRKFDNLTKAERGGLSELDKAGFIKRQLVETRQITKHVAQILDSRMNTKYDENDKLIREVKVITLKSKLVSDFRKDFQFYKVREINNYHHAHDAYLNAVVGTALIKKYPKLESEFVYGDYKVYDVRKMIAKSEQEIGKATAKYFFYSNIMNFFKTEITLANGEIRKRPLIETNGETGEIVWDKGRDFATVRKVLSMPQVNIVKKTEVQTGGFSKESILPKRNSDKLIARKKDWDPKKYGGFDSPTVAYSVLVVAKVEKGKSKKLKSVKELLGITIMERSSFEKNPIDFLEAKGYKEVKKDLIIKLPKYSLFELENGRKRMLASAGELQKGNELALPSKYVNFLYLASHYEKLKGSPEDNEQKQLFVEQHKHYLDEIIEQISEFSKRVILADANLDKVLSAYNKHRDKPIREQAENIIHLFTLTNLGAPAAFKYFDTTIDRKRYTSTKEVLDATLIHQSITGLYETRIDLSQLGGDKRPAATKKAGQAKKKK

SEQ ID NO: 3 - DNA, 9082 bp, Artificial sequence
  /note="Description of artificial sequence: plasmid pCAG-Cas9-bpA"
ggcgcgccggattcgacattgattattgactagttattaatagtaatcaattacggggtcattagttcatagcccatatatggagttccgcgttacataacttacggtaaatggcccgcctggctgaccgcccaacgacccccgcccattgacgtcaataatgacgtatgttcccatagtaacgccaatagggactttccattgacgtcaatgggtggagtatttacggtaaactgcccacttggcagtacatcaagtgtatcatatgccaagtacgccccctattgacgtcaatgacggtaaatggcccgcctggcattatgcccagtacatgaccttatgggactttcctacttggcagtacatctacgtattagtcatcgctattaccatggtcgaggtgagccccacgttctgcttcactctccccatctcccccccctccccacccccaattttgtatttatttattttttaattattttgtgcagcgatgggggcggggggggggggggggcgcgcgccaggcggggcggggcggggcgaggggcggggcggggcgaggcggagaggtgcggcggcagccaatcagagcggcgcgctccgaaagtttccttttatggcgaggcggcggcggcggcggccctataaaaagcgaagcgcgcggcgggcgggagtcgctgcgtcgcgccttcgccccgtgccccgctccgccgccgcctcgcgccgcccgccccggctctgactgaccgcgttactcccacaggtgagcgggcgggacggcccttctcctccgggctgtaattagcgcttggtttaatgacggctcgtttcttttctgtggctgcgtgaaagccttaaagggctccgggagggccctttgtgcgggggggagcggctcggggggtgcgtgcgtgtgtgtgtgcgtggggagcgccgcgtgcggcccgcgctgcccggcggctgtgagcgctgcgggcgcggcgcggggctttgtgcgctccgcgtgtgcgcgaggggagcgcggccgggggcggtgccccgcggtgcgggggggctgcgaggggaacaaaggctgcgtgcggggtgtgtgcgtgggggggtgagcagggggtgtgggcgcggcggtcgggctgtaacccccccctgcacccccctccccgagttgctgagcacggcccggcttcgggtgcggggctccgtgcggggcgtggcgcggggctcgccgtgccgggcggggggtggcggcaggtgggggtgccgggcggggcggggccgcctcgggccggggagggctcgggggaggggcgcggcggccccggagcgccggcggctgtcgaggcgcggcgagccgcagccattgccttttatggtaatcgtgcgagagggcgcagggacttcctttgtcccaaatctggcggagccgaaatctgggaggcgccgccgcaccccctctagcgggcgcgggcgaagcggtgcggcgccggcaggaaggaaatgggcggggagggccttcgtgcgtcgccgcgccgccgtccccttctccatctccagcctcggggctgccgcagggggacggctgccttcgggggggacggggcagggcggggttcggcttctggcgtgtgaccggcggctctagagcctctgctaaccatgttcatgccttcttctttttcctacagatccttaattaataatacgactcactataggggccgccaccatgggacctaagaaaaagaggaaggtggcggccgctgactacaaggatgacgacgataaaggtatccacggagtcccagcagccgacaagaagtacagcatcggcctggacatcggcaccaactctgtgggctgggccgtgatcaccgacgagtacaaggtgcccagcaagaaattcaaggtgctgggcaacaccgaccggcacagcatcaagaagaacctgatcggagccctgctgttcgacagcggcgaaacagccgaggccacccggctgaagagaaccgccagaagaagatacaccagacggaagaaccggatctgctatctgcaagagatcttcagcaacgagatggccaaggtggacgacagcttcttccacagactggaagagtccttcctggtggaagaggataagaagcacgagcggcaccccatcttcggcaacatcgtggacgaggtggcctaccacgagaagtaccccaccatctaccacctgagaaagaaactggtggacagcaccgacaaggccgacctgcggctgatctatctggccctggcccacatgatcaagttccggggccacttcctgatcgagggcgacctgaaccccgacaacagcgacgtggacaagctgttcatccagctggtgcagacctacaaccagctgttcgaggaaaaccccatcaacgccagcggcgtggacgccaaggccatcctgtctgccagactgagcaagagcagacggctggaaaatctgatcgcccagctgcccggcgagaagaagaatggcctgttcggcaacctgattgccctgagcctgggcctgacccccaacttcaagagcaacttcgacctggccgaggatgccaaactgcagctgagcaaggacacctacgacgacgacctggacaacctgctggcccagatcggcgaccagtacgccgacctgtttctggccgccaagaacctgtccgacgccatcctgctgagcgacatcctgagagtgaacaccgagatcaccaaggcccccctgagcgcctctatgatcaagagatacgacgagcaccaccaggacctgaccctgctgaaagctctcgtgcggcagcagctgcctgagaagtacaaagagattttcttcgaccagagcaagaacggctacgccggctacattgacggcggagccagccaggaagagttctacaagttcatcaagcccatcctggaaaagatggacggcaccgaggaactgctcgtgaagctgaacagagaggacctgctgcggaagcagcggaccttcgacaacggcagcatcccccaccagatccacctgggagagctgcacgccattctgcggcggcaggaagatttttacccattcctgaaggacaaccgggaaaagatcgagaagatcctgaccttccgcatcccctactacgtgggccctctggccaggggaaacagcagattcgcctggatgaccagaaagagcgaggaaaccatcaccccctggaacttcgaggaagtggtggacaagggcgcttccgcccagagcttcatcgagcggatgaccaacttcgataagaacctgcccaacgagaaggtgctgcccaagcacagcctgctgtacgagtacttcaccgtgtataacgagctgaccaaagtgaaatacgtgaccgagggaatgagaaagcccgccttcctgagcggcgagcagaaaaaggccatcgtggacctgctgttcaagaccaaccggaaagtgaccgtgaagcagctgaaagaggactacttcaagaaaatcgagtgcttcgactccgtggaaatctccggcgtggaagatcggttcaacgcctccctgggcacataccacgatctgctgaaaattatcaaggacaaggacttcctggacaatgaggaaaacgaggacattctggaagatatcgtgctgaccctgacactgtttgaggacagagagatgatcgaggaacggctgaaaacctatgcccacctgttcgacgacaaagtgatgaagcagctgaagcggcggagatacaccggctggggcaggctgagccggaagctgatcaacggcatccgggacaagcagtccggcaagacaatcctggatttcctgaagtccgacggcttcgccaacagaaacttcatgcagctgatccacgacgacagcctgacctttaaagaggacatccagaaagcccaggtgtccggccagggcgatagcctgcacgagcacattgccaatctggccggcagccccgccattaagaagggcatcctgcagacagtgaaggtggtggacgagctcgtgaaagtgatgggccggcacaagcccgagaacatcgtgatcgaaatggccagagagaaccagaccacccagaagggacagaagaacagccgcgagagaatgaagcggatcgaagagggcatcaaagagctgggcagccagatcctgaaagaacaccccgtggaaaacacccagctgcagaacgagaagctgtacctgtactacctgcagaatgggcgggatatgtacgtggaccaggaactggacatcaaccggctgtccgactacgatgtggaccatatcgtgcctcagagctttctgaaggacgactccatcgacaacaaggtgctgaccagaagcgacaagaaccggggcaagagcgacaacgtgccctccgaagaggtcgtgaagaagatgaagaactactggcggcagctgctgaacgccaagctgattacccagagaaagttcgacaatctgaccaaggccgagagaggcggcctgagcgaactggataaggccggcttcatcaagagacagctggtggaaacccggcagatcacaaagcacgtggcacagatcctggactcccggatgaacactaagtacgacgagaatgacaagctgatccgggaagtgaaagtgatcaccctgaagtccaagctggtgtccgatttccggaaggatttccagttttacaaagtgcgcgagatcaacaactaccaccacgcccacgacgcctacctgaacgccgtcgtgggaaccgccctgatcaaaaagtaccctaagctggaaagcgagttcgtgtacggcgactacaaggtgtacgacgtgcggaagatgatcgccaagagcgagcaggaaatcggcaaggctaccgccaagtacttcttctacagcaacatcatgaactttttcaagaccgagattaccctggccaacggcgagatccggaagcggcctctgatcgagacaaacggcgaaaccggggagatcgtgtgggataagggccgggattttgccaccgtgcggaaagtgctgagcatgccccaagtgaatatcgtgaaaaagaccgaggtgcagacaggcggcttcagcaaagagtctatcctgcccaagaggaacagcgataagctgatcgccagaaagaaggactgggaccctaagaagtacggcggcttcgacagccccaccgtggcctattctgtgctggtggtggccaaagtggaaaagggcaagtccaagaaactgaagagtgtgaaagagctgctggggatcaccatcatggaaagaagcagcttcgagaagaatcccatcgactttctggaagccaagggctacaaagaagtgaaaaaggacctgatcatcaagctgcctaagtactccctgttcgagctggaaaacggccggaagagaatgctggcctctgccggcgaactgcagaagggaaacgaactggccctgccctccaaatatgtgaacttcctgtacctggccagccactatgagaagctgaagggctcccccgaggataatgagcagaaacagctgtttgtggaacagcacaagcactacctggacgagatcatcgagcagatcagcgagttctccaagagagtgatcctggccgacgctaatctggacaaagtgctgtccgcctacaacaagcaccgggataagcccatcagagagcaggccgagaatatcatccacctgtttaccctgaccaatctgggagcccctgccgccttcaagtactttgacaccaccatcgaccggaagaggtacaccagcaccaaagaggtgctggacgccaccctgatccaccagagcatcaccggcctgtacgagacacggatcgacctgtctcagctgggaggcgacaagcgtcctgctgctactaagaaagctggtcaagctaagaaaaagaaatgaacgcgtaaatgattgcagatccactagttctagagctcgctgatcagcctcgactgtgccttctagttgccagccatctgttgtttgcccctcccccgtgccttccttgaccctggaaggtgccactcccactgtcctttcctaataaaatgaggaaattgcatcgcattgtctgagtaggtgtcattctattctggggggtggggtggggcaggacagcaagggggaggattgggaagacaatagcaggcatgctggggatgcggtgggctctatggcttctgaggcggaaagaaccagctggggctcgagatccactagttctagcctcgaggctagagcggccgccactggccgtcgttttacaacgtcgtgactgggaaaaccctggcgttacccaacttaatcgccttgcagcacatccccctttcgccagctggcgtaatagcgaagaggcccgcaccgatcgcccttcccaacagttgcgcagcctgaatggcgaatgggacgcgccctgtagcggcgcattaagcgcggcgggtgtggtggttacgcgcagcgtgaccgctacacttgccagcgccctagcgcccgctcctttcgctttcttcccttcctttctcgccacgttcgccggctttccccgtcaagctctaaatcgggggctccctttagggttccgatttagtgctttacggcacctcgaccccaaaaaacttgattagggtgatggttcacgtagtgggccatcgccctgatagacggtttttcgccctttgacgttggagtccacgttctttaatagtggactcttgttccaaactggaacaacactcaaccctatctcggtctattcttttgatttataagggattttgccgatttcggcctattggttaaaaaatgagctgatttaacaaaaatttaacgcgaattttaacaaaatattaacgcttacaatttaggtggcacttttcggggaaatgtgcgcggaacccctatttgtttatttttctaaatacattcaaatatgtatccgctcatgagacaataaccctgataaatgcttcaataatattgaaaaaggaagagtatgagtattcaacatttccgtgtcgcccttattcccttttttgcggcattttgccttcctgtttttgctcacccagaaacgctggtgaaagtaaaagatgctgaagatcagttgggtgcacgagtgggttacatcgaactggatctcaacagcggtaagatccttgagagttttcgccccgaagaacgttttccaatgatgagcacttttaaagttctgctatgtggcgcggtattatcccgtattgacgccgggcaagagcaactcggtcgccgcatacactattctcagaatgacttggttgagtactcaccagtcacagaaaagcatcttacggatggcatgacagtaagagaattatgcagtgctgccataaccatgagtgataacactgcggccaacttacttctgacaacgatcggaggaccgaaggagctaaccgcttttttgcacaacatgggggatcatgtaactcgccttgatcgttgggaaccggagctgaatgaagccataccaaacgacgagcgtgacaccacgatgcctgtagcaatggcaacaacgttgcgcaaactattaactggcgaactacttactctagcttcccggcaacaattaatagactggatggaggcggataaagttgcaggaccacttctgcgctcggcccttccggctggctggtttattgctgataaatctggagccggtgagcgtgggtctcgcggtatcattgcagcactggggccagatggtaagccctcccgtatcgtagttatctacacgacggggagtcaggcaactatggatgaacgaaatagacagatcgctgagataggtgcctcactgattaagcattggtaactgtcagaccaagtttactcatatatactttagattgatttaaaacttcatttttaatttaaaaggatctaggtgaagatcctttttgataatctcatgaccaaaatcccttaacgtgagttttcgttccactgagcgtcagaccccgtagaaaagatcaaaggatcttcttgagatcctttttttctgcgcgtaatctgctgcttgcaaacaaaaaaaccaccgctaccagcggtggtttgtttgccggatcaagagctaccaactctttttccgaaggtaactggcttcagcagagcgcagataccaaatactgtccttctagtgtagccgtagttaggccaccacttcaagaactctgtagcaccgcctacatacctcgctctgctaatcctgttaccagtggctgctgccagtggcgataagtcgtgtcttaccgggttggactcaagacgatagttaccggataaggcgcagcggtcgggctgaacggggggttcgtgcacacagcccagcttggagcgaacgacctacaccgaactgagatacctacagcgtgagctatgagaaagcgccacgcttcccgaagggagaaaggcggacaggtatccggtaagcggcagggtcggaacaggagagcgcacgagggagcttccagggggaaacgcctggtatctttatagtcctgtcgggtttcgccacctctgacttgagcgtcgatttttgtgatgctcgtcaggggggcggagcctatggaaaaacgccagcaacgcggcctttttacggttcctggccttttgctggccttttgctcacatgttctttcctgcgttatcccctgattctgtggataaccgtattaccgcctttgagtgagctgataccgctcgccgcagccgaacgaccgagcgcagcgagtcagtgagcgaggaagcggaagagcgcccaatacgcaaaccgcctctccccgcgcgttggccgattcattaatgcagctggcacgacaggtttcccgactggaaagcgggcagtgagcgcaacgcaattaatgtgagttagctcactcattaggcaccccaggctttacactttatgcttccggctcgtatgttgtgtggaattgtgagcggataacaatttcacacaggaaacagctatgaccatga

SEQ ID NO: 4 - DNA, 2834 bp, Artificial sequence
  /note="Description of artificial sequence: plasmid pT7-tracr-RNA"
  variation 553: /replace="a" /replace="c" /replace="g" /replace="t"
  variation 554: /replace="a" /replace="c" /replace="g" /replace="t"
  variation 555: /replace="a" /replace="c" /replace="g" /replace="t"
tcgcgcgtttcggtgatgacggtgaaaacctctgacacatgcagctcccggagacggtcacagcttgtctgtaagcggatgccgggagcagacaagcccgtcagggcgcgtcagcgggtgttggcgggtgtcggggctggcttaactatgcggcatcagagcagattgtactgagagtgcaccatatgcggtgtgaaataccgcacagatgcgtaaggagaaaataccgcatcaggcgccattcgccattcaggctgcgcaactgttgggaagggcgatcggtgcgggcctcttcgctattacgccagctggcgaaagggggatgtgctgcaaggcgattaagttgggtaacgccagggttttcccagtcacgacgttgtaaaacgacggccagtgaattcgagctcggtacctcgcgaatgcatctagattaataatacgactcactatagggttggaaccattcaaaacagcatagcaagttaaaataaggctagtccgttatcaacttgaaaaagtggcaccgagtcggtgctttttttgatcagatccnnnatcggatcccgggcccgtcgactgcagaggcctgcatgcaagcttggcgtaatcatggtcatagctgtttcctgtgtgaaattgttatccgctcacaattccacacaacatacgagccggaagcataaagtgtaaagcctggggtgcctaatgagtgagctaactcacattaattgcgttgcgctcactgcccgctttccagtcgggaaacctgtcgtgccagctgcattaatgaatcggccaacgcgcggggagaggcggtttgcgtattgggcgctcttccgcttcctcgctcactgactcgctgcgctcggtcgttcggctgcggcgagcggtatcagctcactcaaaggcggtaatacggttatccacagaatcaggggataacgcaggaaagaacatgtgagcaaaaggccagcaaaaggccaggaaccgtaaaaaggccgcgttgctggcgtttttccataggctccgcccccctgacgagcatcacaaaaatcgacgctcaagtcagaggtggcgaaacccgacaggactataaagataccaggcgtttccccctggaagctccctcgtgcgctctcctgttccgaccctgccgcttaccggatacctgtccgcctttctcccttcgggaagcgtggcgctttctcatagctcacgctgtaggtatctcagttcggtgtaggtcgttcgctccaagctgggctgtgtgcacgaaccccccgttcagcccgaccgctgcgccttatccggtaactatcgtcttgagtccaacccggtaagacacgacttatcgccactggcagcagccactggtaacaggattagcagagcgaggtatgtaggcggtgctacagagttcttgaagtggtggcctaactacggctacactagaagaacagtatttggtatctgcgctctgctgaagccagttaccttcggaaaaagagttggtagctcttgatccggcaaacaaaccaccgctggtagcggtggtttttttgtttgcaagcagcagattacgcgcagaaaaaaaggatctcaagaagatcctttgatcttttctacggggtctgacgctcagtggaacgaaaactcacgttaagggattttggtcatgagattatcaaaaaggatcttcacctagatccttttaaattaaaaatgaagttttaaatcaatctaaagtatatatgagtaaacttggtctgacagttaccaatgcttaatcagtgaggcacctatctcagcgatctgtctatttcgttcatccatagttgcctgactccccgtcgtgtagataactacgatacgggagggcttaccatctggccccagtgctgcaatgataccgcgagacccacgctcaccggctccagatttatcagcaataaaccagccagccggaagggccgagcgcagaagtggtcctgcaactttatccgcctccatccagtctattaattgttgccgggaagctagagtaagtagttcgccagttaatagtttgcgcaacgttgttgccattgctacaggcatcgtggtgtcacgctcgtcgtttggtatggcttcattcagctccggttcccaacgatcaaggcgagttacatgatcccccatgttgtgcaaaaaagcggttagctccttcggtcctccgatcgttgtcagaagtaagttggccgcagtgttatcactcatggttatggcagcactgcataattctcttactgtcatgccatccgtaagatgcttttctgtgactggtgagtactcaaccaagtcattctgagaatagtgtatgcggcgaccgagttgctcttgcccggcgtcaatacgggataataccgcgccacatagcagaactttaaaagtgctcatcattggaaaacgttcttcggggcgaaaactctcaaggatcttaccgctgttgagatccagttcgatgtaacccactcgtgcacccaactgatcttcagcatcttttactttcaccagcgtttctgggtgagcaaaaacaggaaggcaaaatgccgcaaaaaagggaataagggcgacacggaaatgttgaatactcatactcttcctttttcaatattattgaagcatttatcagggttattgtctcatgagcggatacatatttgaatgtatttagaaaaataaacaaataggggttccgcgcacatttccccgaaaagtgccacctgacgtctaagaaaccattattatcatgacattaacctataaaaataggcgtatcacgaggccctttcgtc

SEQ ID NO: 5 - DNA, 2848 bp, Artificial sequence
  /note="Description of artificial sequence: plasmid pT7-crRNA-Rab38"
  variation 567: /replace="a" /replace="c" /replace="g" /replace="t"
  variation 568: /replace="a" /replace="c" /replace="g" /replace="t"
  variation 569: /replace="a" /replace="c" /replace="g" /replace="t"
tcgcgcgtttcggtgatgacggtgaaaacctctgacacatgcagctcccggagacggtcacagcttgtctgtaagcggatgccgggagcagacaagcccgtcagggcgcgtcagcgggtgttggcgggtgtcggggctggcttaactatgcggcatcagagcagattgtactgagagtgcaccatatgcggtgtgaaataccgcacagatgcgtaaggagaaaataccgcatcaggcgccattcgccattcaggctgcgcaactgttgggaagggcgatcggtgcgggcctcttcgctattacgccagctggcgaaagggggatgtgctgcaaggcgattaagttgggtaacgccagggttttcccagtcacgacgttgtaaaacgacggccagtgaattcgagctcggtacctcgcgaatgcatctagattaataatacgactcactataggggttttagagctatgctgttttgaatggtcccaaaaccctgtacaagctgctggtgatcggcgacctgttttagagctatgctgttttgaatggtcccaaaacgatcagatccnnnatcggatcccgggcccgtcgactgcagaggcctgcatgcaagcttggcgtaatcatggtcatagctgtttcctgtgtgaaattgttatccgctcacaattccacacaacatacgagccggaagcataaagtgtaaagcctggggtgcctaatgagtgagctaactcacattaattgcgttgcgctcactgcccgctttccagtcgggaaacctgtcgtgccagctgcattaatgaatcggccaacgcgcggggagaggcggtttgcgtattgggcgctcttccgcttcctcgctcactgactcgctgcgctcggtcgttcggctgcggcgagcggtatcagctcactcaaaggcggtaatacggttatccacagaatcaggggataacgcaggaaagaacatgtgagcaaaaggccagcaaaaggccaggaaccgtaaaaaggccgcgttgctggcgtttttccataggctccgcccccctgacgagcatcacaaaaatcgacgctcaagtcagaggtggcgaaacccgacaggactataaagataccaggcgtttccccctggaagctccctcgtgcgctctcctgttccgaccctgccgcttaccggatacctgtccgcctttctcccttcgggaagcgtggcgctttctcatagctcacgctgtaggtatctcagttcggtgtaggtcgttcgctccaagctgggctgtgtgcacgaaccccccgttcagcccgaccgctgcgccttatccggtaactatcgtcttgagtccaacccggtaagacacgacttatcgccactggcagcagccactggtaacaggattagcagagcgaggtatgtaggcggtgctacagagttcttgaagtggtggcctaactacggctacactagaagaacagtatttggtatctgcgctctgctgaagccagttaccttcggaaaaagagttggtagctcttgatccggcaaacaaaccaccgctggtagcggtggtttttttgtttgcaagcagcagattacgcgcagaaaaaaaggatctcaagaagatcctttgatcttttctacggggtctgacgctcagtggaacgaaaactcacgttaagggattttggtcatgagattatcaaaaaggatcttcacctagatccttttaaattaaaaatgaagttttaaatcaatctaaagtatatatgagtaaacttggtctgacagttaccaatgcttaatcagtgaggcacctatctcagcgatctgtctatttcgttcatccatagttgcctgactccccgtcgtgtagataactacgatacgggagggcttaccatctggccccagtgctgcaatgataccgcgagacccacgctcaccggctccagatttatcagcaataaaccagccagccggaagggccgagcgcagaagtggtcctgcaactttatccgcctccatccagtctattaattgttgccgggaagctagagtaagtagttcgccagttaatagtttgcgcaacgttgttgccattgctacaggcatcgtggtgtcacgctcgtcgtttggtatggcttcattcagctccggttcccaacgatcaaggcgagttacatgatcccccatgttgtgcaaaaaagcggttagctccttcggtcctccgatcgttgtcagaagtaagttggccgcagtgttatcactcatggttatggcagcactgcataattctcttactgtcatgccatccgtaagatgcttttctgtgactggtgagtactcaaccaagtcattctgagaatagtgtatgcggcgaccgagttgctcttgcccggcgtcaatacgggataataccgcgccacatagcagaactttaaaagtgctcatcattggaaaacgttcttcggggcgaaaactctcaaggatcttaccgctgttgagatccagttcgatgtaacccactcgtgcacccaactgatcttcagcatcttttactttcaccagcgtttctgggtgagcaaaaacaggaaggcaaaatgccgcaaaaaagggaataagggcgacacggaaatgttgaatactcatactcttcctttttcaatattattgaagcatttatcagggttattgtctcatgagcggatacatatttgaatgtatttagaaaaataaacaaataggggttccgcgcacatttccccgaaaagtgccacctgacgtctaagaaaccattattatcatgacattaacctataaaaataggcgtatcacgaggccctttcgtc

SEQ ID NO: 6 - DNA, 2849 bp, Artificial sequence
  /note="Description of artificial sequence: plasmid pT7-chRNA-Rab38"
  variation 568: /replace="a" /replace="c" /replace="g" /replace="t"
  variation 569: /replace="a" /replace="c" /replace="g" /replace="t"
  variation 570: /replace="a" /replace="c" /replace="g" /replace="t"
tcgcgcgtttcggtgatgacggtgaaaacctctgacacatgcagctcccggagacggtcacagcttgtctgtaagcggatgccgggagcagacaagcccgtcagggcgcgtcagcgggtgttggcgggtgtcggggctggcttaactatgcggcatcagagcagattgtactgagagtgcaccatatgcggtgtgaaataccgcacagatgcgtaaggagaaaataccgcatcaggcgccattcgccattcaggctgcgcaactgttgggaagggcgatcggtgcgggcctcttcgctattacgccagctggcgaaagggggatgtgctgcaaggcgattaagttgggtaacgccagggttttcccagtcacgacgttgtaaaacgacggccagtgaattcgagctcggtacctcgcgaatgcatctagattaataatacgactcactatagggctgctggtgatcggcgacctgttttagagctagaaatagcaagttaaaataaggctagtccgttatcaacttgaaaaagtggcaccgagtcggtgctttttttgatcagatccnnnatcggatcccgggcccgtcgactgcagaggcctgcatgcaagcttggcgtaatcatggtcatagctgtttcctgtgtgaaattgttatccgctcacaattccacacaacatacgagccggaagcataaagtgtaaagcctggggtgcctaatgagtgagctaactcacattaattgcgttgcgctcactgcccgctttccagtcgggaaacctgtcgtgccagctgcattaatgaatcggccaacgcgcggggagaggcggtttgcgtattgggcgctcttccgcttcctcgctcactgactcgctgcgctcggtcgttcggctgcggcgagcggtatcagctcactcaaaggcggtaatacggttatccacagaatcaggggataacgcaggaaagaacatgtgagcaaaaggccagcaaaaggccaggaaccgtaaaaaggccgcgttgctggcgtttttccataggctccgcccccctgacgagcatcacaaaaatcgacgctcaagtcagaggtggcgaaacccgacaggactataaagataccaggcgtttccccctggaagctccctcgtgcgctctcctgttccgaccctgccgcttaccggatacctgtccgcctttctcccttcgggaagcgtggcgctttctcatagctcacgctgtaggtatctcagttcggtgtaggtcgttcgctccaagctgggctgtgtgcacgaaccccccgttcagcccgaccgctgcgccttatccggtaactatcgtcttgagtccaacccggtaagacacgacttatcgccactggcagcagccactggtaacaggattagcagagcgaggtatgtaggcggtgctacagagttcttgaagtggtggcctaactacggctacactagaagaacagtatttggtatctgcgctctgctgaagccagttaccttcggaaaaagagttggtagctcttgatccggcaaacaaaccaccgctggtagcggtggtttttttgtttgcaagcagcagattacgcgcagaaaaaaaggatctcaagaagatcctttgatcttttctacggggtctgacgctcagtggaacgaaaactcacgttaagggattttggtcatgagattatcaaaaaggatcttcacctagatccttttaaattaaaaatgaagttttaaatcaatctaaagtatatatgagtaaacttggtctgacagttaccaatgcttaatcagtgaggcacctatctcagcgatctgtctatttcgttcatccatagttgcctgactccccgtcgtgtagataactacgatacgggagggcttaccatctggccccagtgctgcaatgataccgcgagacccacgctcaccggctccagatttatcagcaataaaccagccagccggaagggccgagcgcagaagtggtcctgcaactttatccgcctccatccagtctattaattgttgccgggaagctagagtaagtagttcgccagttaatagtttgcgcaacgttgttgccattgctacaggcatcgtggtgtcacgctcgtcgtttggtatggcttcattcagctccggttcccaacgatcaaggcgagttacatgatcccccatgttgtgcaaaaaagcggttagctccttcggtcctccgatcgttgtcagaagtaagttggccgcagtgttatcactcatggttatggcagcactgcataattctcttactgtcatgccatccgtaagatgcttttctgtgactggtgagtactcaaccaagtcattctgagaatagtgtatgcggcgaccgagttgctcttgcccggcgtcaatacgggataataccgcgccacatagcagaactttaaaagtgctcatcattggaaaacgttcttcggggcgaaaactctcaaggatcttaccgctgttgagatccagttcgatgtaacccactcgtgcacccaactgatcttcagcatcttttactttcaccagcgtttctgggtgagcaaaaacaggaaggcaaaatgccgcaaaaaagggaataagggcgacacggaaatgttgaatactcatactcttcctttttcaatattattgaagcatttatcagggttattgtctcatgagcggatacatatttgaatgtatttagaaaaataaacaaataggggttccgcgcacatttccccgaaaagtgccacctgacgtctaagaaaccattattatcatgacattaacctataaaaataggcgtatcacgaggccctttcgtc

SEQ ID NO: 7 - DNA, 140 bp, Artificial sequence
  /note="Description of artificial sequence: Oligodeoxynucleotide ODN-Fus(R513G)"
tgggtagggtagttcagtaacacgtaatctaacataactttttctttcaggggcgagcacagacaggatggcagggagagaccatattagcctggctcctgaagttctggaactcttcctgtacccagtgttacccttgt

SEQ ID NO: 8 - DNA, 2848 bp, Artificial sequence
  /note="Description of artificial sequence: plasmid pT7-crRNA-Fus"
  variation 567: /replace="a" /replace="c" /replace="g" /replace="t"
  variation 568: /replace="a" /replace="c" /replace="g" /replace="t"
  variation 569: /replace="a" /replace="c" /replace="g" /replace="t"
tcgcgcgtttcggtgatgacggtgaaaacctctgacacatgcagctcccggagacggtcacagcttgtctgtaagcggatgccgggagcagacaagcccgtcagggcgcgtcagcgggtgttggcgggtgtcggggctggcttaactatgcggcatcagagcagattgtactgagagtgcaccatatgcggtgtgaaataccgcacagatgcgtaaggagaaaataccgcatcaggcgccattcgccattcaggctgcgcaactgttgggaagggcgatcggtgcgggcctcttcgctattacgccagctggcgaaagggggatgtgctgcaaggcgattaagttgggtaacgccagggttttcccagtcacgacgttgtaaaacgacggccagtgaattcgagctcggtacctcgcgaatgcatctagattaataatacgactcactataggggttttagagctatgctgttttgaatggtcccaaaacaggggcgagcacagacaggatcgcagggaggttttagagctatgctgttttgaatggtcccaaaacgatcagatccnnnatcggatcccgggcccgtcgactgcagaggcctgcatgcaagcttggcgtaatcatggtcatagctgtttcctgtgtgaaattgttatccgctcacaattccacacaacatacgagccggaagcataaagtgtaaagcctggggtgcctaatgagtgagctaactcacattaattgcgttgcgctcactgcccgctttccagtcgggaaacctgtcgtgccagctgcattaatgaatcggccaacgcgcggggagaggcggtttgcgtattgggcgctcttccgcttcctcgctcactgactcgctgcgctcggtcgttcggctgcggcgagcggtatcagctcactcaaaggcggtaatacggttatccacagaatcaggggataacgcaggaaagaacatgtgagcaaaaggccagcaaaaggccaggaaccgtaaaaaggccgcgttgctggcgtttttccataggctccgcccccctgacgagcatcacaaaaatcgacgctcaagtcagaggtggcgaaacccgacaggactataaagataccaggcgtttccccctggaagctccctcgtgcgctctcctgttccgaccctgccgcttaccggatacctgtccgcctttctcccttcgggaagcgtggcgctttctcatagctcacgctgtaggtatctcagttcggtgtaggtcgttcgctccaagctgggctgtgtgcacgaaccccccgttcagcccgaccgctgcgccttatccggtaactatcgtcttgagtccaacccggtaagacacgacttatcgccactggcagcagccactggtaacaggattagcagagcgaggtatgtaggcggtgctacagagttcttgaagtggtggcctaactacggctacactagaagaacagtatttggtatctgcgctctgctgaagccagttaccttcggaaaaagagttggtagctcttgatccggcaaacaaaccaccgctggtagcggtggtttttttgtttgcaagcagcagattacgcgcagaaaaaaaggatctcaagaagatcctttgatcttttctacggggtctgacgctcagtggaacgaaaactcacgttaagggattttggtcatgagattatcaaaaaggatcttcacctagatccttttaaattaaaaatgaagttttaaatcaatctaaagtatatatgagtaaacttggtctgacagttaccaatgcttaatcagtgaggcacctatctcagcgatctgtctatttcgttcatccatagttgcctgactccccgtcgtgtagataactacgatacgggagggcttaccatctggccccagtgctgcaatgataccgcgagacccacgctcaccggctccagatttatcagcaataaaccagccagccggaagggccgagcgcagaagtggtcctgcaactttatccgcctccatccagtctattaattgttgccgggaagctagagtaagtagttcgccagttaatagtttgcgcaacgttgttgccattgctacaggcatcgtggtgtcacgctcgtcgtttggtatggcttcattcagctccggttcccaacgatcaaggcgagttacatgatcccccatgttgtgcaaaaaagcggttagctccttcggtcctccgatcgttgtcagaagtaagttggccgcagtgttatcactcatggttatggcagcactgcataattctcttactgtcatgccatccgtaagatgcttttctgtgactggtgagtactcaaccaagtcattctgagaatagtgtatgcggcgaccgagttgctcttgcccggcgtcaatacgggataataccgcgccacatagcagaactttaaaagtgctcatcattggaaaacgttcttcggggcgaaaactctcaaggatcttaccgctgttgagatccagttcgatgtaacccactcgtgcacccaactgatcttcagcatcttttactttcaccagcgtttctgggtgagcaaaaacaggaaggcaaaatgccgcaaaaaagggaataagggcgacacggaaatgttgaatactcatactcttcctttttcaatattattgaagcatttatcagggttattgtctcatgagcggatacatatttgaatgtatttagaaaaataaacaaataggggttccgcgcacatttccccgaaaagtgccacctgacgtctaagaaaccattattatcatgacattaacctataaaaataggcgtatcacgaggccctttcgtc

SEQ ID NO: 9 - DNA, 2849 bp, Artificial sequence
  /note="Description of artificial sequence: plasmid pT7-chRNA-Fus"
  variation 568: /replace="a" /replace="c" /replace="g" /replace="t"
  variation 569: /replace="a" /replace="c" /replace="g" /replace="t"
  variation 570: /replace="a" /replace="c" /replace="g" /replace="t"
tcgcgcgtttcggtgatgacggtgaaaacctctgacacatgcagctcccggagacggtcacagcttgtctgtaagcggatgccgggagcagacaagcccgtcagggcgcgtcagcgggtgttggcgggtgtcggggctggcttaactatgcggcatcagagcagattgtactgagagtgcaccatatgcggtgtgaaataccgcacagatgcgtaaggagaaaataccgcatcaggcgccattcgccattcaggctgcgcaactgttgggaagggcgatcggtgcgggcctcttcgctattacgccagctggcgaaagggggatgtgctgcaaggcgattaagttgggtaacgccagggttttcccagtcacgacgttgtaaaacgacggccagtgaattcgagctcggtacctcgcgaatgcatctagattaataatacgactcactatagggacagacaggatcgcagggaggttttagagctagaaatagcaagttaaaataaggctagtccgttatcaacttgaaaaagtggcaccgagtcggtgctttttttgatcagatccnnnatcggatcccgggcccgtcgactgcagaggcctgcatgcaagcttggcgtaatcatggtcatagctgtttcctgtgtgaaattgttatccgctcacaattccacacaacatacgagccggaagcataaagtgtaaagcctggggtgcctaatgagtgagctaactcacattaattgcgttgcgctcactgcccgctttccagtcgggaaacctgtcgtgccagctgcattaatgaatcggccaacgcgcggggagaggcggtttgcgtattgggcgctcttccgcttcctcgctcactgactcgctgcgctcggtcgttcggctgcggcgagcggtatcagctcactcaaaggcggtaatacggttatccacagaatcaggggataacgcaggaaagaacatgtgagcaaaaggccagcaaaaggccaggaaccgtaaaaaggccgcgttgctggcgtttttccataggctccgcccccctgacgagcatcacaaaaatcgacgctcaagtcagaggtggcgaaacccgacaggactataaagataccaggcgtttccccctggaagctccctcgtgcgctctcctgttccgaccctgccgcttaccggatacctgtccgcctttctcccttcgggaagcgtggcgctttctcatagctcacgctgtaggtatctcagttcggtgtaggtcgttcgctccaagctgggctgtgtgcacgaaccccccgttcagcccgaccgctgcgccttatccggtaactatcgtcttgagtccaacccggtaagacacgacttatcgccactggcagcagccactggtaacaggattagcagagcgaggtatgtaggcggtgctacagagttcttgaagtggtggcctaactacggctacactagaagaacagtatttggtatctgcgctctgctgaagccagttaccttcggaaaaagagttggtagctcttgatccggcaaacaaaccaccgctggtagcggtggtttttttgtttgcaagcagcagattacgcgcagaaaaaaaggatctcaagaagatcctttgatcttttctacggggtctgacgctcagtggaacgaaaactcacgttaagggattttggtcatgagattatcaaaaaggatcttcacctagatccttttaaattaaaaatgaagttttaaatcaatctaaagtatatatgagtaaacttggtctgacagttaccaatgcttaatcagtgaggcacctatctcagcgatctgtctatttcgttcatccatagttgcctgactccccgtcgtgtagataactacgatacgggagggcttaccatctggccccagtgctgcaatgataccgcgagacccacgctcaccggctccagatttatcagcaataaaccagccagccggaagggccgagcgcagaagtggtcctgcaactttatccgcctccatccagtctattaattgttgccgggaagctagagtaagtagttcgccagttaatagtttgcgcaacgttgttgccattgctacaggcatcgtggtgtcacgctcgtcgtttggtatggcttcattcagctccggttcccaacgatcaaggcgagttacatgatcccccatgttgtgcaaaaaagcggttagctccttcggtcctccgatcgttgtcagaagtaagttggccgcagtgttatcactcatggttatggcagcactgcataattctcttactgtcatgccatccgtaagatgcttttctgtgactggtgagtactcaaccaagtcattctgagaatagtgtatgcggcgaccgagttgctcttgcccggcgtcaatacgggataataccgcgccacatagcagaactttaaaagtgctcatcattggaaaacgttcttcggggcgaaaactctcaaggatcttaccgctgttgagatccagttcgatgtaacccactcgtgcacccaactgatcttcagcatcttttactttcaccagcgtttctgggtgagcaaaaacaggaaggcaaaatgccgcaaaaaagggaataagggcgacacggaaatgttgaatactcatactcttcctttttcaatattattgaagcatttatcagggttattgtctcatgagcggatacatatttgaatgtatttagaaaaataaacaaataggggttccgcgcacatttccccgaaaagtgccacctgacgtctaagaaaccattattatcatgacattaacctataaaaataggcgtatcacgaggccctttcgtc

SEQ ID NO: 10 - DNA, 21 bp, Artificial sequence
  /note="Description of artificial sequence: primer Rab-for"
ggcctccaggatgcagacacc

SEQ ID NO: 11 - DNA, 21 bp, Artificial sequence
  /note="Description of artificial sequence: primer Rab-rev"
ccagcaatgtcccagagctgc

SEQ ID NO: 12 - DNA, 20 bp, Artificial sequence
  /note="Description of artificial sequence: primer Fus-for"
ctatggagatgatcgacgtg

SEQ ID NO: 13 - DNA, 22 bp, Artificial sequence
  /note="Description of artificial sequence: primer Fus-rev"
tggttacaattagggtagtctg

SEQ ID NO: 14 - protein, 1368 aa, Streptococcus pyogenes [sequence omitted]

SEQ ID NO: 15 - protein, 1368 aa, Artificial sequence
  /note="Description of artificial sequence: variant Cas9 (D10A)"
MDKKYSIGLAIGTNSVGWAVITDEYKVPSKKFKVLGNTDRHSIKKNLIGALLFDSGETAEATRLKRTARRRYTRRKNRICYLQEIFSNEMAKVDDSFFHRLEESFLVEEDKKHERHPIFGNIVDEVAYHEKYPTIYHLRKKLVDSTDKADLRLIYLALAHMIKFRGHFLIEGDLNPDNSDVDKLFIQLVQTYNQLFEENPINASGVDAKAILSARLSKSRRLENLIAQLPGEKKNGLFGNLIALSLGLTPNFKSNFDLAEDAKLQLSKDTYDDDLDNLLAQIGDQYADLFLAAKNLSDAILLSDILRVNTEITKAPLSASMIKRYDEHHQDLTLLKALVRQQLPEKYKEIFFDQSKNGYAGYIDGGASQEEFYKFIKPILEKMDGTEELLVKLNREDLLRKQRTFDNGSIPHQIHLGELHAILRRQEDFYPFLKDNREKIEKILTFRIPYYVGPLARGNSRFAWMTRKSEETITPWNFEEVVDKGASAQSFIERMTNFDKNLPNEKVLPKHSLLYEYFTVYNELTKVKYVTEGMRKPAFLSGEQKKAIVDLLFKTNRKVTVKQLKEDYFKKIECFDSVEISGVEDRFNASLGTYHDLLKIIKDKDFLDNEENEDILEDIVLTLTLFEDREMIEERLKTYAHLFDDKVMKQLKRRRYTGWGRLSRKLINGIRDKQSGKTILDFLKSDGFANRNFMQLIHDDSLTFKEDIQKAQVSGQGDSLHEHIANLAGSPAIKKGILQTVKVVDELVKVMGRHKPENIVIEMARENQTTQKGQKNSRERMKRIEEGIKELGSQILKEHPVENTQLQNEKLYLYYLQNGRDMYVDQELDINRLSDYDVDHIVPQSFLKDDSIDNKVLTRSDKNRGKSDNVPSEEVVKKMKNYWRQLLNAKLITQRKFDNLTKAERGGLSELDKAGFIKRQLVETRQITKHVAQILDSRMNTKYDENDKLIREVKVITLKSKLVSDFRKDFQFYKVREINNYHHAHDAYLNAVVGTALIKKYPKLESEFVYGDYKVYDVRKMIAKSEQEIGKATAKYFFYSNIMNFFKTEITLANGEIRKRPLIETNGETGEIVWDKGRDFATVRKVLSMPQVNIVKKTEVQTGGFSKESILPKRNSDKLIARKKDWDPKKYGGFDSPTVAYSVLVVAKVEKGKSKKLKSVKELLGITIMERSSFEKNPIDFLEAKGYKEVKKDLIIKLPKYSLFELENGRKRMLASAGELQKGNELALPSKYVNFLYLASHYEKLKGSPEDNEQKQLFVEQHKHYLDEIIEQISEFSKRVILADANLDKVLSAYNKHRDKPIREQAENIIHLFTLTNLGAPAAFKYFDTTIDRKRYTSTKEVLDATLIHQSITGLYETRIDLSQLGGD

SEQ ID NO: 16 - DNA, 36 bp, Artificial sequence
  /note="Description of artificial sequence: preferred DR sequence for use with the Streptococcus pyogenes Cas9 protein"
gttttagagctatgctgttttgaatggtcccaaaac

SEQ ID NO: 17 - protein, 1138 aa, Acidothermus cellulolyticus
MGGSEVGTVPVTWRLGVDVGERSIGLAAVSYEEDKPKEILAAVSWIHDGGVGDERSGASRLALRGMARRARRLRRFRRARLRDLDMLLSELGWTPLPDKNVSPVDAWLARKRLAEEYVVDETERRRLLGYAVSHMARHRGWRNPWTTIKDLKNLPQPSDSWERTRESLEARYSVSLEPGTVGQWAGYLLQRAPGIRLNPTQQSAGRRAELSNATAFETRLRQEDVLWELRCIADVQGLPEDVVSNVIDAVFCQKRPSVPAERIGRDPLDPSQLRASRACLEFQEYRIVAAVANLRIRDGSGSRPLSLEERNAVIEALLAQTERSLTWSDIALEILKLPNESDLTSVPEEDGPSSLAYSQFAPFDETSARIAEFIAKNRRKIPTFAQWWQEQDRTSRSDLVAALADNSIAGEEEQELLVHLPDAELEALEGLALPSGRVAYSRLTLSGLTRVMRDDGVDVHNARKTCFGVDDNWRPPLPALHEATGHPVVDRNLAILRKFLSSATMRWGPPQSIVVELARGASESRERQAEEEAARRAHRKANDRIRAELRASGLSDPSPADLVRARLLELYDCHCMYCGAPISWENSELDHIVPRTDGGSNRHENLAITCGACNKEKGRRPFASWAETSNRVQLRDVIDRVQKLKYSGNMYWTRDEFSRYKKSVVARLKRRTSDPEVIQSIESTGYAAVALRDRLLSYGEKNGVAQVAVFRGGVTAEARRWLDISIERLFSRVAIFAQSTSTKRLDRRHHAVDAVVLTTLTPGVAKTLADARSRRVSAEFWRRPSDVNRHSTEEPQSPAYRQWKESCSGLGDLLISTAARDSIAVAAPLRLRPTGALHEETLRAFSEHTVGAAWKGAELRRIVEPEVYAAFLALTDPGGRFLKVSPSEDVLPADENRHIVLSDRVLGPRDRVKLFPDDRGSIRVRGGAAYIASFHHARVFRWGSSHSPSFALLRVSLADLAVAGLLRDGVDVFTAELPPWTPAWRYASIALVKAVESGDAKQVGWLVPGDELDFGPEGVTTAAGDLSMFLKYFPERHWVVTGFEDDKRINLKPAFLSAEQAEVLRTERSDRPDTLTEAGEILAQFFPRCWRATVAKVLCHPGLTVIRRTALGQPRWRRGHLPYSWRPWSADPWSGGTP

SEQ ID NO: 18 - protein, 1101 aa, Akkermansia muciniphila
MSRSLTFSFDIGYASIGWAVIASASHDDADPSVCGCGTVLFPKDDCQAFKRREYRRLRRNIRSRRVRIERIGRLLVQAQIITPEMKETSGHPAPFYLASEALKGHRTLAPIELWHVLRWYAHNRGYDNNASWSNSLSEDGGNGEDTERVKHAQDLMDKHGTATMAETICRELKLEEGKADAPMEVSTPAYKNLNTAFPRLIVEKEVRRILELSAPLIPGLTAEIIELIAQHHPLTTEQRGVLLQHGIKLARRYRGSLLFGQLIPRFDNRIISRCPVTWAQVYEAELKKGNSEQSARERAEKLSKVPTANCPEFYEYRMARILCNIRADGEPLSAEIRRELMNQARQEGKLTKASLEKAISSRLGKETETNVSNYFTLHPDSEEALYLNPAVEVLQRSGIGQILSPSVYRIAANRLRRGKSVTPNYLLNLLKSRGESGEALEKKIEKESKKKEADYADTPLKPKYATGRAPYARTVLKKVVEEILDGEDPTRPARGEAHPDGELKAHDGCLYCLLDTDSSVNQHQKERRLDTMTNNHLVRHRMLILDRLLKDLIQDFADGQKDRISRVCVEVGKELTTFSAMDSKKIQRELTLRQKSHTDAVNRLKRKLPGKALSANLIRKCRIAMDMNWTCPFTGATYGDHELENLELEHIVPHSFRQSNALSSLVLTWPGVNRMKGQRTGYDFVEQEQENPVPDKPNLHICSLNNYRELVEKLDDKKGHEDDRRRKKKRKALLMVRGLSHKHQSQNHEAMKEIGMTEGMMTQSSHLMKLACKSIKTSLPDAHIDMIPGAVTAEVRKAWDVFGVFKELCPEAADPDSGKILKENLRSLTHLHHALDACVLGLIPYIIPAHHNGLLRRVLAMRRIPEKLIPQVRPVANQRHYVLNDDGRMMLRDLSASLKENIREQLMEQRVIQHVPADMGGALLKETMQRVLSVDGSGEDAMVSLSKKKDGKKEKNQVKASKLVGVFPEGPSKLKALKAAIEIDGNYGVALDPKPVVIRHIKVFKRIMALKEQNGGKPVRILKKGMLIHLTSSKDPKHAGVWRIESIQDSKGGVKLDLQRAHCAVPKNKTHECNWREVDLISLLKKYQMKRYPTSYTGTPR

SEQ ID NO: 19 - protein, 1062 aa, Actinobacillus succinogenes
MNLNYILGLDLGIASVGWAVVEIDEQENPQRLIDVGVRTFDRAEVLKTGESLALARRLARSSRRLVKRRAERIKKAKRLLKAENLLLSADEILPNEAWQLRVKGLDQKLERQEWAAVLLHLLKHRGYLSQRKNESKSENKELGALLSGVAINHQILQSAEYRTPAEIAVNKFQAEEGHIRNQRGAYTHTFSRLDLLAEMELLFQRQATLGNPHTSTKLLENLTALLMWQKPALAGEAILKMLGKCTFEPTEYKAAKNSYSAERFVWLTKLNNLRILEQGAERALTDNERFALLDQPYEKAKLTYAQVRTLLGLSDEAIFKGLRYQGEDKKAVETKTTLMEVKAYHQIRKALEGLDLKAEWNELKNNPALLDEIGTAFSLYKTDDDIHRYLDGKLSESVLNALLENLNFDKFIQLSLKALQQILPLMLQGQRYDEAVSAIYGDHYGKKSDEIDRLLPNIPTDEIRNPVVLRTLTQARKVINAVVRLYGSPARIHIETGREVGKSYQDRKKLEKQQEENRKQRENAVKKFKEYFPNFVGEPKGKDILKMRLYELQQAKCLYSGKSLELYRLLEKGYVEVDHALPFSRTWDDSFNNKVLVLANENQNKGNATPYEWLDGKNNSEGWQHFVARVQTSGFSYAKKQRVLIQELDEKSFIERNLNDTRYVARFLCNHIADNMLLTGKGKRKVFASNGQITALLRGCWGLQKVRENNDRHHALDAVVVACSTKSMQDKITKFVKYKEGRLFKDKKDGVYKGERINRETGEIISLHFPTPWKFFKENVEIRIFSENPKLELENRLPDYPQYNHEFVQPLFVSRMPTRKMTGQGHMETVKSAKRLDKGLSVLKVPLTQLKLSDLERMVNREREMALYEALKECLEQFGNDPAKAFAEPFYKKGGALVKAVRVEQTQKSGVLVRNGNGVADNATGSIVRVDVFTKGGKYFLVPIYTWQVAKGILPNKAVIQGKDESEWEEMDENAVFQFSMHKNDLIKVKTKKGEIFGYFNGLDRATGSIEIEEHDLEKSKGKNGSHRGLGVKTAFFLEKYQVDELGKNIRPCRPTKRQHVR

SEQ ID NO: 20 - protein, 1064 aa, Bradyrhizobium sp. BTAi1
MKRTSLRAYRLGVDLGANSLGWFVVWLDDHGQPEGLGPGGVRIFPDGRNPQSKQSNAAGRRLARSARRRRDRYLQRRGKLMGLLVKHGLMPADEPARKRLECLDPYGLRAKALDEVLPLHHVGRALFHLNQRRGLFANRAIEQGDKDASAIKAAAGRLQTSMQACGARTLGEFLNRRHQLRATVRARSPVGGDVQARYEFYPTRAMVDAEFEAIWAAQAPHHPTMTAEAHDTIREAIFSQRAMKRPSIGKCSLDPATSQDDVDGFRCAWSHPLAQRFRIWQDVRNLAVVETGPTSSRLGKEDQDKVARALLQTDQLSFDEIRGLLGLPSDARFNLESDRRDHLKGDATGAILSARRHFGPAWHDRSLDRQIDIVALLESALDEAAIIASLGTTHSLDEAAAQRALSALLPDGYCRLGLRAIKRVLPLMEAGRTYAEAASAAGYDHALLPGGKLSPTGYLPYYGQWLQNDVVGSDDERDTNERRWGRLPNPTVHIGIGQLRRVVNELIRWHGPPAEITVELTRDLKLSPRRLAELEREQAENQRKNDKRTSLLRKLGLPASTHNLLKLRLWDEQGDVASECPYTGEAIGLERLVSDDVDIDHLIPFSISWDDSAANKVVCMRYANREKGNRTPFEAFGHRQGRPYDWADIAERAARLPRGKRWRFGPGARAQFEELGDFQARLLNETSWLARVAKQYLAAVTHPHRIHVLPGRLTALLRATWELNDLLPGSDDRAAKSRKDHRHHAIDALVAALTDQALLRRMANAHDDTRRKIEVLLPWPTFRIDLETRLKAMLVSHKPDHGLQARLHEDTAYGTVEHPETEDGANLVYRKTFVDISEKEIDRIRDRRLRDLVRAHVAGERQQGKTLKAAVLSFAQRRDIAGHPNGIRHVRLTKSIKPDYLVPIRDKAGRIYKSYNAGENAFVDILQAESGRWIARATTVFQANQANESHDAPAAQPIMRVFKGDMLRIDHAGAEKFVKIVRLSPSNNLLYLVEHHQAGVFQTRHDDPEDSFRWLFASFDKLREWNAELVRIDTLGQPWRRKRGLETGSEDATRIGWTRPKKWP

SEQ ID NO: 21 - protein, 1436 aa, Bacteroides fragilis 9343
MKRILGLDLGTNSIGWALVNEAENKDERSSIVKLGVRVNPLTVDELTNFEKGKSITTNADRTLKRGMRRNLQRYKLRRETLTEVLKEHKLITEDTILSENGNRTTFETYRLRAKAVTEEISLEEFARVLLMINKKRGYKSSRKAKGVEEGTLIDGMDIARELYNNNLTPGELCLQLLDAGKKFLPDFYRSDLQNELDRIWEKQKEYYPEILTDVLKEELRGKKRDAVWAICAKYFVWKENYTEWNKEKGKTEQQEREHKLEGIYSKRKRDEAKRENLQWRVNGLKEKLSLEQLVIVFQEMNTQINNSSGYLGAISDRSKELYFNKQTVGQYQMEMLDKNPNASLRNMVFYRQDYLDEFNMLWEKQAVYHKELTEELKKEIRDIIIFYQRRLKSQKGLIGFCEFESRQIEVDIDGKKKIKTVGNRVISRSSPLFQEFKIWQILNNIEVTVVGKKRKRRKLKENYSALFEELNDAEQLELNGSRRLCQEEKELLAQELFIRDKMTKSEVLKLLFDNPQELDLNFKTIDGNKTGYALFQAYSKMIEMSGHEPVDFKKPVEKVVEYIKAVFDLLNWNTDILGFNSNEELDNQPYYKLWHLLYSFEGDNTPTGNGRLIQKMTELYGFEKEYATILANVSFQDDYGSLSAKAIHKILPHLKEGNRYDVACVYAGYRHSESSLTREEIANKVLKDRLMLLPKNSLHNPVVEKILNQMVNVINVIIDIYGKPDEIRVELARELKKNAKEREELTKSIAQTTKAHEEYKTLLQTEFGLTNVSRTDILRYKLYKELESCGYKTLYSNTYISREKLFSKEFDIEHIIPQARLFDDSFSNKTLEARSVNIEKGNKTAYDFVKEKFGESGADNSLEHYLNNIEDLFKSGKISKTKYNKLKMAEQDIPDGFIERDLRNTQYIAKKALSMLNEISHRVVATSGSVTDKLREDWQLIDVMKELNWEKYKALGLVEYFEDRDGRQIGRIKDWTKRNDHRHHAMDALTVAFTKDVFIQYFNNKNASLDPNANEHAIKNKYFQNGRAIAPMPLREFRAEAKKHLENTLISIKAKNKVITGNINKTRKKGGVNKNMQQTPRGQLHLETIYGSGKQYLTKEEKVNASFDMRKIGTVSKSAYRDALLKRLYENDNDPKKAFAGKNSLDKQPIWLDKEQMRKVPEKVKIVTLEAIYTIRKEISPDLKVDKVIDVGVRKILIDRLNEYGNDAKKAFSNLDKNPIWLNKEKGISIKRVTISGISNAQSLHVKKDKDGKPILDENGRNIPVDFVNTGNNHHVAVYYRPVIDKRGQLVVDEAGNPKYELEEVVVSFFEAVTRANLGLPIIDKDYKTTEGWQFLFSMKQNEYFVFPNEKTGFNPKEIDLLDVENYGLISPNLFRVQKFSLKNYVFRHHLETTIKDTSSILRGITWIDFRSSKGLDTIVKVRVNHIGQIVSVGEY

SEQ ID NO: 22 - protein, 1021 aa, Clostridium cellulolyticum
MKYTLGLDVGIASVGWAVIDKDNNKIIDLGVRCFDKAEESKTGESLATARRIARGMRRRISRRSQRLRLVKKLFVQYEIIKDSSEFNRIFDTSRDGWKDPWELRYNALSRILKPYELVQVLTHITKRRGFKSNRKEDLSTTKEGVVITSIKNNSEMLRTKNYRTIGEMIFMETPENSNKRNKVDEYIHTIAREDLLNEIKYIFSIQRKLGSPFVTEKLEHDFLNIWEFQRPFASGDSILSKVGKCTLLKEELRAPTSCYTSEYFGLLQSINNLVLVEDNNTLTLNNDQRAKIIEYAHFKNEIKYSEIRKLLDIEPEILFKAHNLTHKNPSGNNESKKFYEMKSYHKLKSTLPTDIWGKLHSNKESLDNLFYCLTVYKNDNEIKDYLQANNLDYLIEYIAKLPTFNKFKHLSLVAMKRIIPFMEKGYKYSDACNMAELDFTGSSKLEKCNKLTVEPIIENVTNPVVIRALTQARKVINAIIQKYGLPYMVNIELAREAGMTRQDRDNLKKEHENNRKAREKISDLIRQNGRVASGLDILKWRLWEDQGGRCAYSGKPIPVCDLLNDSLTQIDHIYPYSRSMDDSYMNKVLVLTDENQNKRSYTPYEVWGSTEKWEDFEARIYSMHLPQSKEKRLLNRNFITKDLDSFISRNLNDTRYISRFLKNYIESYLQFSNDSPKSCVVCVNGQCTAQLRSRWGLNKNREESDLHHALDAAVIACADRKIIKEITNYYNERENHNYKVKYPLPWHSFRQDLMETLAGVFISRAPRRKITGPAHDETIRSPKHFNKGLTSVKIPLTTVTLEKLETMVKNTKGGISDKAVYNVLKNRLIEHNNKPLKAFAEKIYKPLKNGTNGAIIRSIRVETPSYTGVFRNEGKGISDNSLMVRVDVFKKKDKYYLVPIYVAHMIKKELPSKAIVPLKPESQWELIDSTHEFLFSLYQNDYLVIKTKKGITEGYYRSCHRGTGSLSLMPHFANNKNVKIDIGVRTAISIEKYNVDILGNKSIVKGEPRRGMEKYNSFKSN

SEQ ID NO: 23 - protein, 984 aa, Campylobacter jejuni 11168
MARILAFDIGISSIGWAFSENDELKDCGVRIFTKVENPKTGESLALPRRLARSARKRLARRKARLNHLKHLIANEFKLNYEDYQSFDESLAKAYKGSLISPYELRFRALNELLSKQDFARVILHIAKRRGYDDIKNSDDKEKGAILKAIKQNEEKLANYQSVGEYLYKEYFQKFKENSKEFTNVRNKKESYERCIAQSFLKDELKLIFKKQREFGFSFSKKFEEEVLSVAFYKRALKDFSHLVGNCSFFTDEKRAPKNSPLAFMFVALTRIINLLNNLKNTEGILYTKDDLNALLNEVLKNGTLTYKQTKKLLGLSDDYEFKGEKGTYFIEFKKYKEFIKALGEHNLSQDDLNEIAKDITLIKDEIKLKKALAKYDLNQNQIDSLSKLEFKDHLNISFKALKLVTPLMLEGKKYDEACNELNLKVAINEDKKDFLPAFNETYYKDEVTNPVVLRAIKEYRKVLNALLKKYGKVHKINIELAREVGKNHSQRAKIEKEQNENYKAKKDAELECEKLGLKINSKNILKLRLFKEQKEFCAYSGEKIKISDLQDEKMLEIDHIYPYSRSFDDSYMNKVLVFTKQNQEKLNQTPFEAFGNDSAKWQKIEVLAKNLPTKKQKRILDKNYKDKEQKNFKDRNLNDTRYIARLVLNYTKDYLDFLPLSDDENTKLNDTQKGSKVHVEAKSGMLTSALRHTWGFSAKDRNNHLHHAIDAVIIAYANNSIVKAFSDFKKEQESNSAELYAKKISELDYKNKRKFFEPFSGFRQKVLDKIDEIFVSKPERKKPSGALHEETFRKEEEFYQSYGGKEGVLKALELGKIRKVNGKIVKNGDMFRVDIFKHKKTNKFYAVPIYTMDFALKVLPNKAVARSKKGEIKDWILMDENYEFCFSLYKDSLILIQTKDMQEPEFVYYNAFTSSTVSLIVSKHDNKFETLSKNQKILFKNANEKEVIAKSIGIQNLKVFEKYIVSALGEVTKAEFRQREDFKK

SEQ ID NO: 24 - protein, 1426 aa, Capnocytophaga ochracea
MKNILGLDLGTTSIGFAHIVEDENKEKSEIKELGVRIVSLTTDEQSDFEKGKSITTNANRTLKHGARLNLDRYQQRRKYLIDLLQKANLITPSSILAENGKNTTHSTWQLRAKAVTERIEKEEFARILLAINKKRGYKSSRKAKTEDEGQAIDGMAIAKRLYDENLTPGQLSLQLLQQNKKLLPDFYRSDLQKEFDLVWNFQKQFYPDILTDIFYKELQGKGKDATSKAFSKRYHFDTTENKGSKESVRLQAYQWRAEAISKQLSKEEVAYVLTEINNNLNNASGYLGAISDRSKELYFNRQTVGQYLYAKLQENRHNSLKNKVFYRQDYLDEFERIWETQASFHKELTDELKKQIRDVVIFYQRKPKSQKGLISFCEFESKEIEIEKDGKTITKNIGARVVPKSSPLFQEFKIWQILNNVICKRKGIRKKKISAKTTQLDLLNESSQTIFSLDMECKQLLFDELNLKGDLKSDKVLKLLGYSPQEWEINYNQLEGNRTQKALYEAYLKIVEMEAHDVKDILQIKSAKDDWSLDESPLSASEIREKVKAIFQTLGICTKILYFDPLLPVKEFEEQDSYQLWHLLYSYESDDSTSGNETLYRILEKKYAFKREHARILANVALQDDYGSLSTKAIRKIYPNIKENQYSTACEKAGYKHSKLSLTTEELEARELKNIIPLLKKNALRNPVVEKILNQMINVVNALIEKNSERDAEGKITKYFHFDEIRIELARELKKNAQKRYEMTQNINKAKLEHQKISEILQKEFGIKNPTKSDIIRYRLYQELEHNGYKELYTNAPIARDMLFSKNIEIEHIVPKARVFDDSFSNKTLTFHRINSDKGEYTAFDYITSLNSEEELNQYLTRVENAYKTKSISPTKYKNLLKKASEIGDDFINRDLRDTQYIAKKAKEILFQVTKNVLSTSGSITDRLREDWGLVDVMKELNMPKYQSLGLTEVEERKDGNKVTVIKNWTKRNDHRHHAMDALTVAFTKPSYIQYLNHLNARKDENNKNYSVILAIEEKETIKVPTNNGKNKRVFIEPIPNFRQVAKKHLEEIFISHKAKNKVVTKNTNKPAGTDKQQITLTPRGQLHKETIYGKYQYYINKEEKIGVKFDERTIAKVSNPVYREALLKRLQANDNDPKKAFAGKNALSKNPIYLDESKTKTLPEKVNLTYLEEDFSIRKDISPDNFKDLKSIEKVIDQGVKRILIKRLQAYDNDPKKAFVDLEKNPIWLNKEKGIAIKRVTISGVNNAQPLHIGKDHLGKTTLNKEGKEIPVDYVSTGNNHHVAIYRDKEGNLQEQIVSFFDAVVRAQQGIPIIDKTYKQAEGWQFLFTMKQNEMFVFPNATTGFNPAEIDLLDPKNKKLISPNLFRVQKIATKDYFFRHHLETNVETDNILKNVTWKREGLSGLKDIVKVRINHLGDIVSIGEY

SEQ ID NO: 25 - protein, 1084 aa, Corynebacterium diphtheriae
MKYHVGIDVGTFSVGLAAIEVDDAGMPIKTLSLVSHIHDSGLDPDEIKSAVTRLASSGIARRTRRLYRRKRRRLQQLDKFIQRQGWPVIELEDYSDPLYPWKVRAELAASYIADEKERGEKLSVALRHIARHRGWRNPYAKVSSLYLPDGPSDAFKAIREEIKRASGQPVPETATVGQMVTLCELGTLKLRGEGGVLSARLQQSDYAREIQEICRMQEIGQELYRKIIDVVFAAESPKGSASSRVGKDPLQPGKNRALKASDAFQRYRIAALIGNLRVRVDGEKRILSVEEKNLVFDHLVNLTPKKEPEWVTIAEILGIDRGQLIGTATMTDDGERAGARPPTHDTNRSIVNSRIAPLVDWWKTASALEQHAMVKALSNAEVDDFDSPEGAKVQAFFADLDDDVHAKLDSLHLPVGRAAYSEDTLVRLTRRMLSDGVDLYTARLQEFGIEPSWTPPTPRIGEPVGNPAVDRVLKTVSRWLESATKTWGAPERVIIEHVREGFVTEKRAREMDGDMRRRAARNAKLFQEMQEKLNVQGKPSRADLWRYQSVQRQNCQCAYCGSPITFSNSEMDHIVPRAGQGSTNTRENLVAVCHRCNQSKGNTPFAIWAKNTSIEGVSVKEAVERTRHWVTDTGMRSTDFKKFTKAVVERFQRATMDEEIDARSMESVAWMANELRSRVAQHFASHGTTVRVYRGSLTAEARRASGISGKLKFFDGVGKSRLDRRHHAIDAAVIAFTSDYVAETLAVRSNLKQSQAHRQEAPQWREFTGKDAEHRAAWRVWCQKMEKLSALLTEDLRDDRVVVMSNVRLRLGNGSAHKETIGKLSKVKLSSQLSVSDIDKASSEALWCALTREPGFDPKEGLPANPERHIRVNGTHVYAGDNIGLFPVSAGSIALRGGYAELGSSFHHARVYKITSGKKPAFAMLRVYTIDLLPYRNQDLFSVELKPQTMSMRQAEKKLRDALATGNAEYLGWLVVDDELVVDTSKIATDQVKAVEAELGTIRRWRVDGFFSPSKLRLRPLQMSKEGIKKESAPELSKIIDRPGWLPAVNKLFSDGNVTVVRRDSLGRVRLESTAHLPVTWKVQ

SEQ ID NO: 26 - protein, 1079 aa, Dinoroseobacter shibae
MRLGLDIGTSSIGWWLYETDGAGSDARITGVVDGGVRIFSDGRDPKSGASLAVDRRAARAMRRRRDRYLRRRATLMKVLAETGLMPADPAEAKALEALDPFALRAAGLDEPLPLPHLGRALFHLNQRRGFKSNRKTDRGDNESGKIKDATARLDMEMMANGARTYGEFLHKRRQKATDPRHVPSVRTRLSIANRGGPDGKEEAGYDFYPDRRHLEEEFHKLWAAQGAHHPELTETLRDLLFEKIFFQRPLKEPEVGLCLFSGHHGVPPKDPRLPKAHPLTQRRVLYETVNQLRVTADGREARPLTREERDQVIHALDNKKPTKSLSSMVLKLPALAKVLKLRDGERFTLETGVRDAIACDPLRASPAHPDRFGPRWSILDADAQWEVISRIRRVQSDAEHAALVDWLTEAHGLDRAHAEATAHAPLPDGYGRLGLTATTRILYQLTADVVTYADAVKACGWHHSDGRTGECFDRLPYYGEVLERHVIPGSYHPDDDDITRFGRITNPTVHIGLNQLRRLVNRIIETHGKPHQIVVELARDLKKSEEQKRADIKRIRDTTEAAKKRSEKLEELEIEDNGRNRMLLRLWEDLNPDDAMRRFCPYTGTRISAAMIFDGSCDVDHILPYSRTLDDSFPNRTLCLREANRQKRNQTPWQAWGDTPHWHAIAANLKNLPENKRWRFAPDAMTRFEGENGFLDRALKDTQYLARISRSYLDTLFTKGGHVWVVPGRFTEMLRRHWGLNSLLSDAGRGAVKAKNRTDHRHHAIDAAVIAATDPGLLNRISRAAGQGEAAGQSAELIARDTPPPWEGFRDDLRVRLDRIIVSHRADHGRIDHAARKQGRDSTAGQLHQETAYSIVDDIHVASRTDLLSLKPAQLLDEPGRSGQVRDPQLRKALRVATGGKTGKDFENALRYFASKPGPYQAIRRVRIIKPLQAQARVPVPAQDPIKAYQGGSNHLFEIWRLPDGEIEAQVITSFEAHTLEGEKRPHPAAKRLLRVHKGDMVALERDGRRVVGHVQKMDIANGLFIVPHNEANADTRNNDKSDPFKWIQIGARPAIASGIRRVSVDEIGRLRDGGTRPI

SEQ ID NO: 27 - protein, 1131 aa, Diaphorobacter sp. TPSY
MAQHVFGLDIGIASVGWAILGEQRIIDLGVRCFDKAETAKEGDPLNLTRRQARLLRRRLYRRAWRLTQLSRLLKRKGLIADAKLFAKAPSYGDSAWELRRQGLDRLLTPLEWARVIYHQCKHRGFHWTSKAEEAKADSDAEGGRVKQGLAHTKALMQAKNYRSAAEMVLAEFPDAQRNKRGQYDKALSRVLLGEELALLFATQRRLGNPHASDFFEKLILGDGDRKSGLFWQQKPALSGADLLKMLGKCTFEKGEYRAPKASFSVERHVWLTRLNNLRIVVDGRSRPLNEAERQAALLLPYQTETSKYKTLKNAFIKAGLWGDGVRFGGLAYPSQAQIDAEKTKDPEDQFLVKLPAWHELRKAFKAAGHEALWQQISTPALDGDPTLLDQIATVLSVYKDGAEVVQQLRQLALPEPAASIAVLEKISFDKFSSLSLKALRRIVPLMQSGLRYDEAVAQIPEYGHHSQRIEPGAAKHLYLPPFYEAQRKYAGKGDHIGSMQFRDDADIPRNPVVLRALNQARKVVNALIREYGSPIAVNIEMARDLSRPLDERNKVKRAQEEFRDRNDRARSEFERDFGYKPKAAAFEKWMLYREQLGQCAYSQQPLDIQRVLDDHNYAQVDHALPYSRSYDDSKNNKVLVLTHENQNKGNRTAFEYLTSFPDGEDGERWRTFVAWVQGNKAYRMAKRNRLLRKNYGVDESKGFIDRNLNDTRYICKFFKNYVEEHLQLAARADGDTARRCVVVNGQLTAFLRARWGLTKVRGDSDRHHALDAAVVAACTHGMVKALADYSRRKEISFLQEGFPDPETGEILNPAAFDRARQHFPEPWTHFAHELKARLFTDDLAALREDMQRLGSYTTEDLGRLRTLFVSRAPQRRSGGAVHKETIYAQPESLKQQGGVIEKILLTSLKLQDFDKLLNPESNDHFVEPHRNERLYAAIRQRLEQFGGRADKAFGPDNLFHKPDKNNQPTGPVVRSIKLVRGKQTGIPIRGGLAKNDSMLRVDIFTKAGKFHLVPVYVHHRVTGLPNRAIVAFKDEDEWTLIDESFAFLFSVYPNDYVKVTLKKEQQSGYYSGADRSTGAMNLWAHDRAASVGKDGLIRGIGVKTALSVEKFNVDVLGRIYLAPPETRSGLA

SEQ ID NO: 28 - protein, 1195 aa, Elusimicrobium minutum
MQKNINTKQNHIYIKQAQKIKEKLGDKPYRIGLDLGVGSIGFAIVSMEENDGNVLLPKEIIMVGSRIFKASAGAADRKLSRGQRNNHRHTRERMRYLWKVLAEQKLALPVPADLDRKENSSEGETSAKRFLGDVLQKDIYELRVKSLDERLSLQELGYVLYHIAGHRGSSAIRTFENDSEEAQKENTENKKIAGNIKRLMAKKNYRTYGEYLYKEFFENKEKHKREKISNAANNHKFSPTRDLVIKEAEAILKKQAGKDGFHKELTEEYIEKLTKAIGYESEKLIPESGFCPYLKDEKRLPASHKLNEERRLWETLNNARYSDPIVDIVTGEITGYYEKQFTKEQKQKLFDYLLTGSELTPAQTKKLLGLKNTNFEDIILQGRDKKAQKIKGYKLIKLESMPFWARLSEAQQDSFLYDWNSCPDEKLLTEKLSNEYHLTEEEIDNAFNEIVLSSSYAPLGKSAMLIILEKIKNDLSYTEAVEEALKEGKLTKEKQAIKDRLPYYGAVLQESTQKIIAKGFSPQFKDKGYKTPHTNKYELEYGRIANPVVHQTLNELRKLVNEIIDILGKKPCEIGLETARELKKSAEDRSKLSREQNDNESNRNRIYEIYIRPQQQVIITRRENPRNYILKFELLEEQKSQCPFCGGQISPNDIINNQADIEHLFPIAESEDNGRNNLVISHSACNADKAKRSPWAAFASAAKDSKYDYNRILSNVKENIPHKAWRFNQGAFEKFIENKPMAARFKTDNSYISKVAHKYLACLFEKPNIICVKGSLTAQLRMAWGLQGLMIPFAKQLITEKESESFNKDVNSNKKIRLDNRHHALDAIVIAYASRGYGNLLNKMAGKDYKINYSERNWLSKILLPPNNIVWENIDADLESFESSVKTALKNAFISVKHDHSDNGELVKGTMYKIFYSERGYTLTTYKKLSALKLTDPQKKKTPKDFLETALLKFKGRESEMKNEKIKSAIENNKRLFDVIQDNLEKAKKLLEEENEKSKAEGKKEKNINDASIYQKAISLSGDKYVQLSKKEPGKFFAISKPTPTTTGYGYDTGDSLCVDLYYDNKGKLCGEIIRKIDAQQKNPLKYKEQGFTLFERIYGGDILEVDFDIHSDKNSFRNNTGSAPENRVFIKVGTFTEITNNNIQIWFGNIIKSTGGQDDSFTINSMQQYNPRKLILSSCGFIKYRSPILKNKEG

SEQ ID NO: 29 - protein, 1114 aa, Eubacterium rectal
MNYTEKEKLFMKYILALDIGIASVGWAILDKESETVIEAGSNIFPEASAADNQLRRDMRGAKRNNRRLKTRINDFIKLWENNNLSIPQFKSTEIVGLKVRAITEEITLDELYLILYSYLKHRGISYLEDALDDTVSGSSAYANGLKLNAKELETHYPCEIQQERLNTIGKYRGQSQIINENGEVLDLSNVFTIGAYRKEIQRVFEIQKKYHPELTDEFCDGYMLIFNRKRKYYEGPGNEKSRTDYGRFTTKLDANGNYITEDNIFEKLIGKCSVYPDELRAAAASYTAQEYNVLNDLNNLTINGRKLEENEKHEIVERIKSSNTINMRKIISDCMGENIDDFAGARIDKSGKEIFHKFEVYNKMRKALLEIGIDISNYSREELDEIGYIMTINTDKEAMMEAFQKSWIDLSDDVKQCLINMRKTNGALFNKWQSFSLKIMNELIPEMYAQPKEQMTLLTEMGVTKGTQEEFAGLKYIPVDVVSEDIFNPVVRRSVRISFKILNAVLKKYKALDTIVIEMPRDRNSEEQKKRINDSQKLNEKEMEYIEKKLAVTYGIKLSPSDFSSQKQLSLKLKLWNEQDGICLYSGKTIDPNDIINNPQLFEIDHIIPRSISFDDARSNKVLVYRSENQKKGNQTPYYYLTHSHSEWSFEQYKATVMNLSKKKEYAISRKKIQNLLYSEDITKMDVLKGFINRNINDTSYASRLVLNTIQNFFMANEADTKVKVIKGSYTHQMRCNLKLDKNRDESYSHHAVDAMLIGYSELGYEAYHKLQGEFIDFETGEILRKDMWDENMSDEVYADYLYGKKWANIRNEVVKAEKNVKYWHYVMRKSNRGLCNQTIRGTREYDGKQYKINKLDIRTKEGIKVFAKLAFSKKDSDRERLLVYLNDRRTFDDLCKIYEDYSDAANPFVQYEKETGDIIRKYSKKHNGPRIDKLKYKDGEVGACIDISHKYGFEKGSKKVILESLVPYRMDVYYKEENHSYYLVGVKQSDIKFEKGRNVIDEEAYARILVNEKMIQPGQSRADLENLGFKFKLSFYKNDIIEYEKDGKIYTERLVSRTMPKQRNYIETKPIDKAKFEKQNLVGLGKTKFIKKYRYDILGNKYSCSEEKFTSFC

SEQ ID NO: 30 - protein, 1512 aa, Fibrobacter succinogenes
MKKILGLDLGTNSIGWAVVNADEITRDDGSRYLKPNGISAAGSRIIPMSADILGDFEKGNSISQTAERTRMRMARRLHERALLRRERLLRVLNLLDFLPKHFADKIDRYGKFTDDSEPKLAWRKNTEGKYEFIFQDAFNEMLAEFKDKQPEIVEEGKKIPYDWTIYYLRKKALEKALSKEELSWILLQFNQKRGYYQLRGEEEEIPQDKKIEYLAQKVVKVEATDQKKGDDVWYNVYLENGMIYRRTSKAPLDWEGKVKEFIVTTEVENDGETPKKDKEGNIKRSFRAPKEDDWTLLKKKTEADIENSHKTVGCYIYDSLLNNPKQKIIGKLVRTVERKFYKEELTQILKKQVELIPELRDDNLYKQCIEELYPINEAHRNTIAKTDFANLFINDILFYQRPLKSKKSQIDNCPYEERIFIDSKTGEKKKVPVKCIAKSNPLFQEFRLWQFIQNLRIYQREKEIDGKLLTDIDITSECLKSEEDYVRLFDWLNDRETIEQEDLLKHLFNTKKSKNKENPYRWNYVEDKVYPCNETRATILKGFSKCGINASVLSPELEMALWHILYSVEDKKEIETALTHFAQKQGWNDDFAKVFSKAKPFKKDYGSYSEKAIKKLLSLMRMGKYWNQDNIDKNTLDRIDKIINGEYDEKISNRVRDNAINLKDISDFRGLPVWLACYIVYDRHSEAKDCTKWNSPEEIDSYLKKFKQHSLRNPIVEQVVTETLRTVRDIWIQEEQIDEIHLELGRDLKNPADKRKKMSENILKNENTNLRIKAMLMEFMNPSMGIENVRPYSPSQQDILRIYEENALDNLTKDDKDFDFISKISKQAQPSKTDIIRYKCWLEQKYRSPYTGKTISLSKLFTPAYEIEHVIPQSLYFDDSFSNKVICEAEVNKLKDRQLGYKFIAEHHGEKVQLSQGEVVEILSVDAYEKFVKENYANNRIKMKKLLMESIPDEFIERQLNDSRYISKVVKGLLSNIVREKIDDENYEPEAVSKNLISCNGAITDRLKKDWGMNDVWNSIILPRFIRMNQITGKDCFTTTNAEGHLIPQMPLELQKGFNKKRIDHRHHAMDAIVIACTTRDHVNLLNNEAAHSKFNATRYQLQRKLRRFEKAVIDGKEREVAKEFLKPWDSFSSDSKNILENIIVSFKQNQRVINKTTNAFLHFDENGKKTFIKQGKGDSWAIRKSMHKDTVFGEINLRKVRSVSLNEAIKVPERVLNKKIKEKILELKNNKIDAKNIKKYIEENHTGGYGIDSSKIDVFYFTKETKERFFATRKTLDTSFNQAKIKDSIADSGIQKILLAHLKSKNGDAEQAFSPDGIDEMNKNIVELNNGKFHQPILKVRVYEKADKFAVGQKGNKKVKFVEAAKGTNLFFAIFEKDGKRSYLTIPLNVMIDCQKQYGNQWKNNIEAYLKEKELVEKDVKLQFILSPNDLVYLPTEGSIDKKRIYKVVSFTNNRLYAIPYAIAKSIVDKNEFTQLNKIEFTDNKESIKDACVPVIIDRLGNVIEFNGKRL

SEQ ID NO: 31 - protein, 1347 aa, Finegoldia magna
MKSEKKYYIGLDVGTNSVGWAVTDEFYNILRAKGKDLWGVRLFEKADTAANTRIFRSGRRRNDRKGMRLQILREIFEDEIKKVDKDFYDRLDESKFWAEDKKVSGKYSLFNDKNFSDKQYFEKFPTIFHLRKYLMEEHGKVDIRYYFLAINQMMKRRGHFLIDGQISHVTDDKPLKEQLILLINDLLKIELEEELMDSIFEILADVNEKRTDKKNNLKELIKGQDFNKQEGNILNSIFESIVTGKAKIKNIISDEDILEKIKEDNKEDFVLTGDSYEENLQYFEEVLQENITLFNTLKSTYDFLILQSILKGKSTLSDAQVERYDEHKKDLEILKKVIKKYDEDGKLFKQVFKEDNGNGYVSYIGYYLNKNKKITAKKKISNIEFTKYVKGILEKQCDCEDEDVKYLLGKIEQENFLLKQISSINSVIPHQIHLFELDKILENLAKNYPSFNNKKEEFTKIEKIRKTFTFRIPYYVGPLNDYHKNNGGNAWIFRNKGEKIRPWNFEKIVDLHKSEEEFIKRMLNQCTYLPEETVLPKSSILYSEYMVLNELNNLRINGKPLDTDVKLKLIEELFKKKTKVTLKSIRDYMVRNNFADKEDFDNSEKNLEIASNMKSYIDFNNILEDKFDVEMVEDLIEKITIHTGNKKLLKKYIEETYPDLSSSQIQKIINLKYKDWGRLSRKLLDGIKGTKKETEKTDTVINFLRNSSDNLMQIIGSQNYSFNEYIDKLRKKYIPQEISYEVVENLYVSPSVKKMIWQVIRVTEEITKVMGYDPDKIFIEMAKSEEEKKTTISRKKLLDLYKAIKKDERDSQYEKLLTGLNKLDDSDLRSRKLYLYYTQMGRDMYTGEKIDLDKLFDSTHYDKDHIIPQSMKKDDSIINNLVLVNKNANQTTKGNIYPVPSSIRNNPKIYNYWKYLMEKEFISKEKYNRLIRNTPLTNEELGGFINRQLVETRQSTKAIKELFEKFYQKSKIIPVKASLASDLRKDMNTLKSREVNDLHHAHDAFLNIVAGDVWNREFTSNPINYVKENREGDKVKYSLSKDFTRPRKSKGKVIWTPEKGRKLIVDTLNKPSVLISNESHVKKGELFNATIAGKKDYKKGKIYLPLKKDDRLQDVSKYGGYKAINGAFFFLVEHTKSKKRIRSIELFPLHLLSKFYEDKNTVLDYAINVLQLQDPKIIIDKINYRTEIIIDNFSYLISTKSNDGSITVKPNEQMYWRVDEISNLKKIENKYKKDAILTEEDRKIMESYIDKIYQQFKAGKYKNRRTTDTIIEKYEIIDLDTLDNKQLYQLLVAFISLSYKTSNNAVDFTVIGLGTECGKPRITNLPDNTYLVYKSITGIYEKRIRIK

SEQ ID NO: 32 - protein, 1354 aa, Flavobacterium psychrophilum
MKKILGLDLGTNSIGWAFINEAENEIEVSSIVNTGVRIVPLTTDEESDFKKGNTISINADRTLKRGARRGLQRFKQRREALLETFNRIKFIATDFVYAETGAATTFSSYQLRAKSAVEAVTKEELVKVLLMLNKKRGYKSSRKAKTAEEGDAIDGMKIAKEIFENNLTPGQWVYNSLSKGGKFIPDFYHSDLQKELEKIVRFQNQFHSEQINDKLLADIQGKSRTQTSQHFSKTLNIPLAENKGTREETKLQHYQWRNEALANELDMKILAFIITEINNQINQSSGYLGAISDRSKELYFNQETVGQYQYKQLQENVHAKLKNQVFYRQDYLDEFEKIWETQAKFHSELNEKLKAEIRDITIFYQRKLKSQKHLVSFCEFEKGHKAIPKSSPLFQEFRIWQNLNNVVVKNETTKEVFELSEELKQLIAEELQFKESMTDVQMLTFCELKKGTHTVNFKKIEGNRTNTSIYKAFEKILEVEGYEIDFSKMKPLEIKETVAPIFETLNINTVILDFDPTIQGNDFDKQPYYQLWHLLYSAEDDDKLKETLKTKFGFKENHLPFILNINLQADYGSLSAKAIKKILPHLMDGHIYDKACLMVGYNHSSSLTTAQNNDRVLKDTLELLKKNSLRNPVVEKILNQMINVINAIMKDPAMGKPDEIRVELARELKANNEQRKKATSDINTATTEHERIRKLLHSEFNIPRVTRNDIIRYKLWLETGGISLYTGNPIKASDLFSKNYDIEHIIPKSRLFDDSFSNKTLCERQLNIDKSNKTAYSFLQEKLSENDFAAYENRVKDLFKTGKIKSYTKYKKLLMADNEIPEGFIDRQLRETQYIAKKAKEILLEVSRNVTATIGSVTDKLRQDWELVDVMKELNWEKYDKLGLTHIEEGKNGERLSKIKDWTKRNDHRHHAMDAITVAFTKPAYIQYLNNLNAKTQGENKANSIIGIENKHLYRDKNNKLRFISPMKNFREEAKKQLESILISYKAKNKVVTKNKNTTKKSGGTNQKIQLTPRGRLHKETVYGKLQQYATKEEKVNASFTEDYIQKVAKKEYREALLKRLEENDNDPKKAFTGKNALNKTPIYISLKDNIIVPEKVKTVWLETDYTIRKDITPDLKIDKVIDVGIKRILQNRLNEFNGDPKKAFVNLGESPIWLNKEKGIAIKRVTISGVSNAQALHTKKDHLGNEILDKNGNPIPVDFISTGNNHHVAIYRDEKGNLQEEVVSFYDAVIRRNLGLSVINKNHEKGWEFLFSMKQNEFFIFPSDGFNPHEIDLLNPNNYHLISPNIFRVQKISTKNYMFNHHLETKAVDGEMLKSKKELSKTSYHFIQTPTNLNGIIKVRINHLGKIVHLGEY

SEQ ID NO: 33 - protein, 1377 aa, Streptococcus agalactiae
MNKPYSIGLDIGTNSVGWSIITDDYKVPAKKMRVLGNTDKEYIKKNLIGALLFDGGNTAADRRLKRTARRRYTRRRNRILYLQEIFAEEMSKVDDSFFHRLEDSFLVEEDKRGSKYPIFATMQEEKYYHEKFPTIYHLRKELADKKEKADLRLVYLALAHIIKFRGHFLIEDDRFDVRNTDIQKQYQAFLEIFDTTFENNHLLSQNVDVEAILTDKISKSAKKDRILAQYPNQKSTGIFAEFLKLIVGNQADFKKHFNLEDKTPLQFAKDSYDEDLENLLGQIGDEFADLFSVAKKLYDSVLLSGILTVTDLSTKAPLSASMIQRYDEHHEDLKHLKQFVKASLPENYREVFADSSKDGYAGYIEGKTNQEAFYKYLLKLLTKQEGSEYFLEKIKNEDFLRKQRTFDNGSIPHQVHLTELRAIIRRQSEYYPFLKENQDRIEKILTFRIPYYVGPLAREKSDFAWMTRKTDDSIRPWNFEDLVDKEKSAEAFIHRMTNNDLYLPEEKVLPKHSLIYEKFTVYNELTKVRFLAEGFKDFQFLNRKQKETIFNSLFKEKRKVTEKDIISFLNKVDGYEGIAIKGIEKQFNASLSTYHDLKKILGKDFLDNTDNELILEDIVQTLTLFEDREMIKKCLDIYKDFFTESQLKKLYRRHYTGWGRLSAKLINGIRNKENQKTILDYLIDDGSANRNFMQLINDDDLSFKPIIDKARTGSHSDNLKEVVGELAGSPAIKKGILQSLKIVDELVKVMGYEPEQIVVEMARENQTTAKGLSRSRQRLTTLRESLANLKSNILEEKKPKYVKDQVENHHLSDDRLFLYYLQNGRDMYTKKALDIDNLSQYDIDHIIPQAFIKDDSIDNRVLVSSAKNRGKSDDVPSIEIVKARKMFWKNLLDAKLMSQRKYDNLTKAERGGLTSDDKARFIQRQLVETRQITKHVARILDERFNNEVDNGKKICKVKIVTLKSNLVSNFRKEFGFYKIREVNDYHHAHDAYLNAVVAKAILTKYPQLEPEFVYGMYRQKKLSKIVHEDKEEKYSEATRKMFFYSNLMNMFKRVVRLADGSIVVRPVIETGRYMRKTAWDKKKHFATVRKVLSYPQNNIVKKTEIQTGGFSKESILAHGNSDKLIPRKTKDIYLDPKKYGGFDSPIVAYSVLVVADIKKGKAQKLKTVTELLGITIMERSRFEKNPSAFLESKGYLNIRDDKLMILPKYSLFELENGRRRLLASAGELQKGNELALPTQFMKFLYLASRYNESKGKPEEIEKKQEFVNQHVSYFDDILQLINDFSKRVILADANLEKINKLYQDNKENIPVDELANNIINLFTFTSLGAPAAFKFFDKIVDRKRYTSTKEVLNSTLIHQSITGLYETRIDLGKLGED

SEQ ID NO: 34 - protein, 1050 aa, Gluconacetobacter diazotrophicus
MGENMIDESLTFGIDLGIGSCGWAVLRRPSAFGRKGVIEGMGSWCFDVPETSKERTPTNQIRRSNRLLRRVIRRRRNRMAAIRRLLHAAGLLPSTDSDALKRPGHDPWELRARGLDKPLKPVEFAVVLGHIAKRRGFKSAAKRKATNISSDDKKMLTALEATRERLGRYRTVGEMFARDPDFASRRRNREGKYDRTTARDDLEHEVHALFAAQRRLGQGFASPELEEAFTASAFHQRPMQDSERLVGFCPFERTEKRAAKLTPSFERFRLLARLLNLRITTPDGERPLTVDEIALVTRDLGKTAKLSIKRVRTLIGLEDNQRFTTIRPEDEDRDIVARTGGAMTGTATLRKALGEALWTDMQERPEQLDAIVQVLSFFEANETITEKLREIGLTLAVLDVLLTALDAGVFAKFKGAAHISTKAARNLLPHLEQGRRYDEACTMAGYDHAASRLSHHGQIVAKTQFNALVTEIGESIANPIARKALIEGLKQIWAMRNHWGLPGSIHVELARDVGNSIEKRREIEKHIEKNTALRARERREVHDLLDLEDVNGDTLLRYRLWKEQGGKCLYTGKAIHIRQIAATDNSVQVDHILPWSRFGDDSFNNKTLCLASANQQKKRSTPYEWLSGQTGDAWNAFVQRIETNKELRGFKKRNYLLKNAKEAEEKFRSRNLNDTRYAARLFAEAVKLLYAFGERQEKGGNRRVFTRPGALTAALRQAWGVESLKKQDGKRINDDRHHALDALTVAAVDEAEIQRLTKSFHEWEQQGLGRPLRRVEPPWESFRADVEATYPEVFVARPERRRARGEGHAATIRQVKERECTPIVFERKAVSSLKEADLERIKDGERNEAIVEAIRSWIATGRPADAPPRSPRGDIITKIRLATTIKAAVPVRGGTAGRGEMVRADVFSKPNRRGKDEWYLVPVYPHQIMNRKAWPKPPMRSIVANKDEDEWTEVGPEHQFRFSLYPRSNIEIIRPSGEVIEGYFVGLHRNTGALTISAHNDPKSIHSGIGTKTLLAISKYQVDRFGRKSPVRKEVRTWHGEACISPTPPG

SEQ ID NO: 35 - protein, 131 aa, Helicobacter hepaticus
MRILGFDIGITSIGWAYVESNELKDCGVRIFTKAENPKNGDSLAAPRREARGARRRLARRKARLNAIKRLLCKEFELNLNDYLANDGELPKAYQTSKDTKSPYELYTAFHWIIFAFCSIASSLSNRQMLPI

SEQ ID NO: 36 - protein, 1361 aa, Lactobacillus casei BL23
MTKLGKPYGIGVDIGSNSIGFAAVDENSHLIRLKGKTVIGARLFEEGKAAADRRASRTTRRRLSRNRWRLSFLRDFFESHITPTGPNFFMRQKYSEISPKDKARYKYEKRLFNDRTDAEFYQQYPTMYHLRNRLLTDPSKADVREIYFAIHHILKSRGHFLTSGYAKDFNTNKVALNEIFPALQDAYAQVYPDLDITFDENKVNEFKTVLLNEKATPSDTQRALVNLLLAEDGDKDILKQQKQVLTEFAKAVVGLKTKLNVALGTEVDSSEATVWNFSLGQLDDKWAGIESAMTDEGTEILDQIRDLYRARLLNGIVPAGKTLSQAKVDDYAQHHEDLELFKDYLKQLEDDGTAKAIRQLYDRYIDGDDAKPFVREDFVKALTKEVTAHPNAKSPELLERLAQPDFMLKQRNKANGAIPVQMQQRELDQIIKNQSVYYDWLAAPNPVEKHRKSMPYQLDELLNFRIPYYVGPLVTAKEQKAAQGGVFAWMVRKDPDGNITPYNFDEKVDREASANTFIQRMKTTDTYLIGEDVLPKQSLLYQRYEVLNELNNVRVNNEKLSIEQKQQVIRELFERHNSVTIKQFAENLRAHGDYAHIPEIRGLADEKRFLSSLSTYRQLKSLLPDAIDDPAKQADIENIIAWSTVFEDAAIFKTKLKEINWLDSQTITKLSNIRYRGWGQFSHKFLNGLTLGNGHTIIQELFLSNNNLMQILTDETLQKKMTELNADKLKAANINDAIDDAYTSPSNKKALRQVLRVIEDIKRAADGQDPSWLYVETADGGGTPGKRTRARQHQLQEIYANAAHELIDSAVRGELEDKIADKADFNDRLVLYFMQGGRDIYTGTPLNIDQLSSYDIDHILPQSLIKDNSLDNRVLVHAIINREKNATFASTIYAQKMNATWRQWHEAGLISGRKLRNLQMRPDQIDKYASGFVARQLVETRQIIKLTEQIVAAQYPETKIIAVKAGLSHQLREELEFPKNRDVNHYHHAFDAFLAARIGTYLLKRFPNLQAFFTYGKFKKADVKKLRGFNFIRDITHAEDKIVVKDTGEVIWDKKRDVDELDRIYNFKRMLITHEVHFEKADLFKQTVYGAKDSKEAGGKKQLISKKKGYPVDIYGGYTQETGSYLSVVRLTKKAMYAVVKVSTRDAAKLAVAKSISEQKENETLNDIIDEKLSKISKNGKITHELFEVVLPRVGQKTLFKNSKYNLFLVNSDTYMHNYQELWMPREYQKMWKDISLSKYGDAQTEDQLDQIFGFIVSQVNSYFNLYDINQFRKKLNDAADKFATLPMRDTDDMQGKIATIGQLLIGLQANAARSDLRNLDIKTPLGLLQIPNGISLDSDTSVVYQSPTGLLEREVHLSDL

SEQ ID NO: 37 - protein, 1334 aa, Listeria innocua
MKKPYTIGLDIGTNSVGWAVLTDQYDLVKRKMKIAGDSEKKQIKKNFWGVRLFDEGQTAADRRMARTARRRIERRRNRISYLQGIFAEEMSKTDANFFCRLSDSFYVDNEKRNSRHPFFATIEEEVEYHKNYPTIYHLREELVNSSEKADLRLVYLALAHIIKYRGNFLIEGALDTQNTSVDGIYKQFIQTYNQVFASGIEDGSLKKLEDNKDVAKILVEKVTRKEKLERILKLYPGEKSAGMFAQFISLIVGSKGNFQKPFDLIEKSDIECAKDSYEEDLESLLALIGDEYAELFVAAKNAYSAVVLSSIITVAETETNAKLSASMIERFDTHEEDLGELKAFIKLHLPKHYEEIFSNTEKHGYAGYIDGKTKQADFYKYMKMTLENIEGADYFIAKIEKENFLRKQRTFDNGAIPHQLHLEELEAILHQQAKYYPFLKENYDKIKSLVTFRIPYFVGPLANGQSEFAWLTRKADGEIRPWNIEEKVDFGKSAVDFIEKMTNKDTYLPKENVLPKHSLCYQKYLVYNELTKVRYINDQGKTSYFSGQEKEQIFNDLFKQKRKVKKKDLELFLRNMSHVESPTIEGLEDSFNSSYSTYHDLLKVGIKQEILDNPVNTEMLENIVKILTVFEDKRMIKEQLQQFSDVLDGVVLKKLERRHYTGWGRLSAKLLMGIRDKQSHLTILDYLMNDDGLNRNLMQLINDSNLSFKSIIEKEQVTTADKDIQSIVADLAGSPAIKKGILQSLKIVDELVSVMGYPPQTIVVEMARENQTTGKGKNNSRPRYKSLEKAIKEFGSQILKEHPTDNQELRNNRLYLYYLQNGKDMYTGQDLDIHNLSNYDIDHIVPQSFITDNSIDNLVLTSSAGNREKGDDVPPLEIVRKRKVFWEKLYQGNLMSKRKFDYLTKAERGGLTEADKARFIHRQLVETRQITKNVANILHQRFNYEKDDHGNTMKQVRIVTLKSALVSQFRKQFQLYKVRDVNDYHHAHDAYLNGVVANTLLKVYPQLEPEFVYGDYHQFDWFKANKATAKKQFYTNIMLFFAQKDRIIDENGEILWDKKYLDTVKKVMSYRQMNIVKKTEIQKGEFSKATIKPKGNSSKLIPRKTNWDPMKYGGLDSPNMAYAVVIEYAKGKNKLVFEKKIIRVTIMERKAFEKDEKAFLEEQGYRQPKVLAKLPKYTLYECEEGRRRMLASANEAQKGNQQVLPNHLVTLLHHAANCEVSDGKSLDYIESNREMFAELLAHVSEFAKRYTLAEANLNKINQLFEQNKEGDIKAIAQSFVDLMAFNAMGAPASFKFFETTIERKRYNNLKELLNSTIIYQSITGLYESRKRLDD

SEQ ID NO: 38 - protein, 1149 aa, Lactobacillus salivarius
MERYHIGLDIGTSSIGWAVIGDDFKIKRKKGKNLIGVRLFKEGDTAAERRGFRTQRRRLNRRKWRLKLLEEIFDPYMAEVDKYFFARLKESNLSPKDSNKKYLGSLLFPDISDSNFYDKYPTIYHLRRDLMEKDKKFDLREIYLAIHHIVKYRGNFLEKVPAKNYKNSGASIGFLLEEVNDLYGNIIGNEDVAILDNDKFEDVEKIILNDEIRNIDKQKNVGRLLVKDKKEKNIVTAFSKAIFGYKFNLEDLLLIESDEKNKLTFNDENIDDIFNELSHSLNDNQMDLLTKTREIYFKFKLNMIVPTGYTISESMIEKYEMHKAHLKMYKEFINTLNAKDRKILKNAYSDYINNEKAKAANAQENFYKTVKKTIKENDSDTAKKIIGLIDEGNFMPKQRTGENGVIPHQLHQIELDRIIENQAKYYPWLAEENPVEKNRKFAKYKLDELVTFRVPYYVGPLIDKTESNKNEKETKFAWMVRKAKGTITPWNFENLVDRTESANRFIKRMTSKDTYIIGEDVLPASSLLYEKYKVLNELNNIKVNKKKLDVEQKQHVYLDLFTTRKNVTKDDLATSLNCDVESITGLTDNKKFNSSLSSYIDLKAILGNIVDDYSKNEDLEKIIEYSTIFEDGNIYKEKLSEISWLTDEQIEKLSNIHFKGWGRLSKKLLTQITNENGERIIDTLWNTSNNFIQVISDESIQAKLAEINGEYANKYNLEDILDEAYTSPQNKKAIRQVMKVVEDIEKAMKCEPTSIAIEFTREKRKSKLTNTRYKKISETYEKITDELISEYELGKLQSELDSKVNNMRDRYYLYFMQLGRDMYTGEKMNIDELHQKYDIDHILPQSFIKDDSLNNRVLTSKSVNIKEKSDKTAADLYAAKMGDFWRKLRKQGLMTEQKYKNLLTRTDSINKYTKQSFIKRQLVETSQVVKLAANILQDKYRNTKIIEIRARLNSDLRKKYELIKNREVNDYHHAIDGYLTTFVGQYLYKVYPKLRSYFVYDDFKKLDSNYLKHMDKFNFIWKLEDKKAEDVYDKVNDEFVLNVPEMKEYIRKIYNYKYMLVSKEVTTKNGAFYDQTKYNAKTINLIPIKKDKPTNIYGGYKGKVSSYMMLVKIQKKKEVIYKFVGVPRLWTDELDRLIDTDEKKALLKK

SEQ ID NO: 39 - protein, 1368 aa, Streptococcus pyogenes MGAS6180
MDKKYSIGLDIGTNSVGWAVITDDYKVPSKKFKVLGNTDRHSIKKNLIGALLFDSGETAEATRLKRTARRRYTRRKNRICYLQEIFSNEMAKVDDSFFHRLEESFLVEEDKKHERHPIFGNIVDEVAYHEKYPTIYHLRKKLVDSTDKADLRLIYLALAHMIKFRGHFLIEGDLNPDNSDVDKLFIQLVQTYNQLFEENPINASGVDAKAILSARLSKSRRLENLIAQLPGEKKNGLFGNLIALSLGLTPNFKSNFDLAEDAKLQLSKDTYDDDLDNLLAQIGDQYADLFLAAKNLSDAILLSDILRLNSEITKAPLSASMIKRYDEHHQDLTLLKALVRQQLPEKYKEIFFDQSKNGYAGYIDGGASQEEFYKFIKPILEKMDGTEELLAKLNREDLLRKQRTFDNGSIPHQIHLGELHAILRRQEDFYPFLKDNREKIEKILTFRIPYYVGPLARGNSRFAWMTRKSEETITPWNFEEVVDKGASAQSFIERMTNFDKNLPNEKVLPKHSLLYEYFTVYNELTKVKYVTEGMRKPAFLSGEQKKAIVDLLFKTNRKVTVKQLKEDYFKKIECFDSVEISGVEDRFNASLGTYHDLLKIIKDKDFLDNEENEDILEDIVLTLTLFEDREMIEERLKTYAHLFDDKVMKQLKRRRYTGWGRLSRKLINGIRDKQSGKTILDFLKSDGFANRNFMQLIHDDSLTFKEDIQKAQVSGQGDSLHEHIANLAGSPAIKKGILQTVKVVDELVKVMGRHKPENIVIEMARENQTTQKGQKNSRERMKRIEEGIKELGSQILKEHPVENTQLQNEKLYLYYLQNGRDMYVDQELDINRLSDYDVDHIVPQSFIKDDSIDNKVLTRSDKNRGKSNNVPSEEVVKKMKNYWRQLLNAKLITQRKFDNLTKAERGGLSELDKAGFIKRQLVETRQITKHVAQILDSRMNTKYDENDKLIREVKVITLKSKLVSDFRKDFQFYKVREINNYHHAHDAYLNAVVGTALIKKYPKLESEFVYGDYKVYDVRKMIAKSEQEIGKATAKYFFYSNIMNFFKTEITLANGEIRKRPLIETNGETGEIVWDKGRDFATVRKVLSMPQVNIVKKTEVQTGGFSKESILPKRNSDKLIARKKDWDPKKYGGFDSPTVAYSVLVVAKVEKGKSKKLKSVKELLGITIMERSSFEKNPIDFLEAKGYKEVRKDLIVKLPKYSLFELENGRKRMLASAGELQKGNELALPSKYVNFLYLASHYEKLKGSPEDNEQKQLFVEQHKHYLDEIIEQISEFSKRVILADANLDKVLSAYNKHRDKPIREQAENIIHLFTLTNLGAPAAFKYFDTTIDRKRYTSTKEVLDATFIHQSITGLYETRIDLSQLGGD

SEQ ID NO: 40 - protein, 1368 aa, Streptococcus
MDKKYSIGLDIGTNSVGWAVITDDYKVPSKKFKVLGNTDRHSIKKNLIGALLFDSGETAEATRLKRTARRRYTRRKNRICYLQEIFSNEMAKVDDSFFHRLEESFLVEEDKKHERHPIFGNIVDEVAYHEKYPTIYHLRKKLVDSTDKADLRLIYLALAHMIKFRGHFLIEGDLNPDNSDVDKLFIQLVQTYNQLFEENPINASGVDAKAILSARLSKSRRLENLIAQLPGEKKNGLFGNLIALSLGLTPNFKSNFDLAEDAKLQLSKDTYDDDLDNLLAQIGDQYADLFLAAKNLSDAILLSDILRLNSEITKAPLSASMIKRYDEHHQDLTLLKALVRQQLPEKYKEIFFDQSKNGYAGYIDGGASQEEFYKFIKPILEKMDGTEELLAKLNREDLLRKQRTFDNGSIPHQIHLGELHAILRRQEDFYPFLKDNREKIEKILTFRIPYYVGPLARGNSRFAWMTRKSEETITPWNFEEVVDKGASAQSFIERMTNFDKNLPNEKVLPKHSLLYEYFTVYNELTKVKYVTEGMRKPAFLSGEQKKAIVDLLFKTNRKVTVKQLKEDYFKKIECFDSVEISGVEDRFNASLGTYHDLLKIIKDKDFLDNEENEDILEDIVLTLTLFEDREMIEERLKTYAHLFDDKVMKQLKRRRYTGWGRLSRKLINGIRDKQSGKTILDFLKSDGFANRNFMQLIHDDSLTFKEDIQKAQVSGQGDSLHEHIANLAGSPAIKKGILQTVKVVDELVKVMGRHKPENIVIEMARENQTTQKGQKNSRERMKRIEEGIKELGSQILKEHPVENTQLQNEKLYLYYLQNGRDMYVDQELDINRLSDYDVDHIVPQSFIKDDSIDNKVLTRSDKNRGKSDNVPSEEVVKKMKNYWRQLLNAKLITQRKFDNLTKAERGGLSELDKAGFIKRQLVETRQITKHVAQILDSRMNTKYDENDKLIREVKVITLKSKLVSDFRKDFQFYKVREINNYHHAHDAYLNAVVGTALIKKYPKLESEFVYGDYKVYDVRKMIAKSEQEIGKATAKYFFYSNIMNFFKTEITLANGEIRKRPLIETNGETGEIVWDKGRDFATVRKVLSMPQVNIVKKTEVQTGGFSKESILPKRNSDKLIARKKDWDPKKYGGFDSPTVAYSVLVVAKVEKGKSKKLKSVKELLGLTIMERSSFEKNPIDFLEAKGYKEVKKDLIIKLPKYSLFELENGRKRMLASAGELQKGNELALPSKYVNFLYLASHYEKLKGSPEDNEQKQLFVEQHKHYLDEIIEQISEFSKRVILADANLDKVLSAYNKHRDKPIREQAENIIHLFTLTNLGAPAAFKYFDTTIDRKRYTSTKEVLDATLIHQSITGLYETRIDLSQLGGD

SEQ ID NO: 41 - protein, 1371 aa, Streptococcus
MDKKYSIGLDIGTNSVGWAVITDDYKVPSKKFKVLGNTDRHSIKKNLIGALLFDSGETAEATRLKRTARRRYTRRKNRICYLQEIFSNEMAKVDDSFFHRLEESFLVEEDKKHERHPIFGNIVDEVAYHEKYPTIYHLRKKLADSTDKADLRLIYLALAHMIKFRGHFLIEGDLNPDNSDVDKLFIQLVQTYNQLFEENPINASRVDAKAILSARLSKSRRLENLIAQLPGEKKNGLFGNLIALSLGLTPNFKSNFDLAEDAKLQLSKDTYDDDLDNLLAQIGDQYADLFLAAKNLSDATLLSDILRVNSEITKAPLSASMIKRYDEHHQDLTLLKALVRQQLPEKYKEIFFDQSKNGYAGYIDGGASQEEFYKFIKPILEKMDGTEELLAKLNREDLLRKQRTFDNGSIPHQIHLGELHAILRRQEDFYPFLKDNREKIEKILTFRIPYYVGPLARGNSRFAWMTRKSEETITPWNFEEVVDKGASAQSFIERMTNFDKNLPNEKVLPKHSLLYEYFTVYNELTKVKYVTEGMRKPAFLSGEQKKAIVDLLFKTNRKVTVKQLKEDYFKKIECFDSVEISGVEDRFNASLGTYHDLLKIIKDKDFLDNEENEDILEDIVLTLTLFEDKEMIEERLKTYAHLFDDKVMKQLKRRHYTGWGRLSRKLINGIRDKQSGKTILDFLKSDGFANRNFIQLIHDDSLTFKEAIQKAQVSGQGHSLHEQIANLAGSPAIKKGILQSVKVVDELVKVMGHKPENIVIEMARENQTTQKGQKNSRERMKRIEEGIKELGSQILKEHPVENTQLQNEKLYLYYLQNGRDMYVDQELDINRLSDYDVDHIVPQSFIKDDSIDNKVLTRSDKNRGKSDDVPSEEVVKKMKNYWRQLLNAKLITQRKFDNLTKAERGGLSELDKAGFIKRQLVETRQITKHVAQILDSRMNTKYDENDKLIREVKVITLKSKLVSDFRKDFQFYKVREINNYHHAHDAYLNAVVGTALIKKYPKLESEFVYGDYKVYDVRKMIAKSEQEIGKATAKRFFYSNIMNFFKTEITLANGEIRKRPLIETNEETGEIVWDKGRDFATVRKVLSMPQVNIVKKTEVQTGALTNESIYARGSFDKLISRKHRFESSKYGGFGSPTVTYSVLVVAKSKVQDGKVKKIKTGKELIGITLLDKLVFEKNPLKFIEDKGYGNVQIDKCIKLPKYSLFEFENGTRRMLASVMANNNSRGDLQKANEMFLPAKLVTLLYHAHKIESSKELEHEAYILDHYNDLYQLLSYIERFASLYVDVEKNISKVKELFSNIESYSISEICSSVINLLTLTASGAPADFKFLGTTIPRKRYGSPQSILSSTLIHQSITGLYETRIDLSQLGSD

SEQ ID NO: 42 - protein, 1368 aa, Streptococcus pyogenes MGAS2096
MDKKYSIGLDIGTNSVGWAVITDDYKVPSKKFKVLGNTDRHSIKKNLIGALLFDSGEIAEATRLKRTARRRYTRRKNRICYLQEIFSNEMAKVDDSFFHRLEESFLVEEDKKHERHPIFGNIVDEVAYHEKYPTIYHLRKKLVDSTDKADLRLIYLALAHMIKFRGHFLIEGDLNPDNSDVDKLFIQLVQTYNQLFEENPINASGVDAKAILSARLSKSRRLENLIAQLPGEKKNGLFGNLIALSLGLTPNFKSNFDLAEDAKLQLSKDTYDDDLDNLLAQIGDQYADLFLAAKNLSDAILLSDILRLNSEITKAPLSASMIKRYDEHHQDLTLLKALVRQQLPEKYKEIFFDQSKNGYAGYIDGGASQEEFYKFIKPILEKMDGTEELLAKLNREDLLRKQRTFDNGSIPHQIHLGELHAILRRQEDFYPFLKDNREKIEKILTFRIPYYVGPLARGNSRFAWMTRKSEETITPWNFEEVVDKGASAQSFIERMTNFDKNLPNEKVLPKHSLLYEYFTVYNELTKVKYVTEGMRKPAFLSGEQKKAIVDLLFKTNRKVTVKQLKEDYFKKIECFDSVEISGVEDRFNASLGTYHDLLKIIKDKDFLDNEENEDILEDIVLTLTLFEDREMIEERLKTYAHLFDDKVMKQLKRRRYTGWGRLSRKLINGIRDKQSGKTILDFLKSDGFANRNFMQLIHDDSLTFKEDIQKAQVSGQGDSLHEHIANLAGSPAIKKGILQTVKVVDELVKVMGRHKPENIVIEMARENQTTQKGQKNSRERMKRIEEGIKELGSQILKEHPVENTQLQNEKLYLYYLQNGRDMYVDQELDINRLSDYDVDHIVPQSFIKDDSIDNKVLTRSDKNRGKSDNVPSEEVVKKMKNYWRQLLNAKLITQRKFDNLTKAERGGLSELDKAGFIKRQLVETRQITKHVAQILDSRMNTKYDENDKLIREVKVITLKSKLVSDFRKDFQFYKVREINNYHHAHDAYLNAVVGTALIKKYPKLESEFVYGDYKVYDVRKMLAKSEQEIGKATAKYFFYSNIMNFFKTEITLANGEIRKRPLIETNGETGEIVWDKGRDFATVRKVLSMPQVNIVKKTEVQTGGFSKESILPKRNSDKLIARKKDWDPKKYGGFDSPTVAYSVLVVAKVEKGKSKKLKSVKELLGITIMERSSFEKNPIDFLEAKGYKEVRKDLIIKLPKYSLFELENGRKRMLASAGELQKGNELALPSKYVNFLYLASHYEKLKGSPEDNEQKQLFVEQHKHYLDEIIEQISEFSKRVILADANLDKVLSAYNKHRDKPIREQAENIIHLFTLTNLGAPTAFKYFDTTIDRKRYTSTKEVLDATFIHQSITGLYETRIDLSQLGGD

SEQ ID NO: 43 - protein, 1368 aa, Streptococcus pyogenes MGAS9429
MDKKYSIGLDIGTNSVGWAVITDDYKVPSKKFKVLGNTDRHSIKKNLIGALLFDSGEIAEATRLKRTARRRYTRRKNRICYLQEIFSNEMAKVDDSFFHRLEESFLVEEDKKHERHPIFGNIVDEVAYHEKYPTIYHLRKKLVDSTDKADLRLIYLALAHMIKFRGHFLIEGDLNPDNSDVDKLFIQLVQTYNQLFEENPINASGVDAKAILSARLSKSRRLENLIAQLPGEKKNGLFGNLIALSLGLTPNFKSNFDLAEDAKLQLSKDTYDDDLDNLLAQIGDQYADLFLAAKNLSDAILLSDILRLNSEITKAPLSASMIKRYDEHHQDLTLLKALVRQQLPEKYKEIFFDQSKNGYAGYIDGGASQEEFYKFIKPILEKMDGTEELLAKLNREDLLRKQRTFDNGSIPHQIHLGELHAILRRQEDFYPFLKDNREKIEKILTFRIPYYVGPLARGNSRFAWMTRKSEETITPWNFEEVVDKGASAQSFIERMTNFDKNLPNEKVLPKHSLLYEYFTVYNELTKVKYVTEGMRKPAFLSGEQKKAIVDLLFKTNRKVTVKQLKEDYFKKIECFDSVEISGVEDRFNASLGTYHDLLKIIKDKDFLDNEENEDILEDIVLTLTLFEDREMIEERLKTYAHLFDDKVMKQLKRRRYTVWGRLSRKLINGIRDKQSGKTILDFLKSDGFANRNFMQLIHDDSLTFKEDIQKAQVSGQGDSLHEHIANLAGSPAIKKGILQTVKVVDELVKVMGRHKPENIVIEMARENQTTQKGQKNSRERMKRIEEGIKELGSQILKEHPVENTQLQNEKLYLYYLQNGRDMYVDQELDINRLSDYDVDHIVPQSFIKDDSIDNKVLTRSDKNRGKSDNVPSEEVVKKMKNYWRQLLNAKLITQRKFDNLTKAERGGLSELDKAGFIKRQLVETRQITKHVAQILDSRMNTKYDENDKLIREVKVITLKSKLVSDFRKDFQFYKVREINNYHHAHDAYLNAVVGTALIKKYPKLESEFVYGDYKVYDVRKMLAKSEQEIGKATAKYFFYSNIMNFFKTEITLANGEIRKRPLIETNGETGEIVWDKGRDFATVRKVLSMPQVNIVKKTEVQTGGFSKESILPKRNSDKLIARKKDWDPKKYGGFDSPTVAYSVLVVAKVEKGKSKKLKSVKELLGITIMERSSFEKNPIDFLEAKGYKEVRKDLIIKLPKYSLFELENGRKRMLASAGELQKGNELALPSKYVNFLYLASHYEKLKGSPEDNEQKQLFVEQHKHYLDEIIEQISEFSKRVILADANLDKVLSAYNKHRDKPIREQAENIIHLFTLTNLGAPTAFKYFDTTIDRKRYTSTKEVLDATFIHQSITGLYETRIDLSQLGGD

SEQ ID NO: 44 - protein, 1236 aa, Mycoplasma mobile
MYFYKNKENKLNKKVVLGLDLGIASVGWCLTDISQKEDNKFPIILHGVRLFETVDDSDDKLLNETRRKKRGQRRRNRRLFTRKRDFIKYLIDNNIIELEFDKNPKILVRNFIEKYINPFSKNLELKYKSVTNLPIGFHNLRKAAINEKYKLDKSELIVLLYFYLSLRGAFFDNPEDTKSKEMNKNEIEIFDKNESIKNAEFPIDKIIEFYKISGKIRSTINLKFGHQDYLKEIKQVFEKQNIDFMNYEKFAMEEKSFFSRIRNYSEGPGNEKSFSKYGLYANENGNPELIINEKGQKIYTKIFKTLWESKIGKCSYDKKLYRAPKNSFSAKVFDITNKLTDWKHKNEYISERLKRKILLSRFLNKDSKSAVEKILKEENIKFENLSEIAYNKDDNKINLPIINAYHSLTTIFKKHLINFENYLISNENDLSKLMSFYKQQSEKLFVPNEKGSYEINQNNNVLHIFDAISNILNKFSTIQDRIRILEGYFEFSNLKKDVKSSEIYSEIAKLREFSGTSSLSFGAYYKFIPNLISEGSKNYSTISYEEKALQNQKNNFSHSNLFEKTWVEDLIASPTVKRSLRQTMNLLKEIFKYSEKNNLEIEKIVVEVTRSSNNKHERKKIEGINKYRKEKYEELKKVYDLPNENTTLLKKLWLLRQQQGYDAYSLRKIEANDVINKPWNYDIDHIVPRSISFDDSFSNLVIVNKLDNAKKSNDLSAKQFIEKIYGIEKLKEAKENWGNWYLRNANGKAFNDKGKFIKLYTIDNLDEFDNSDFINRNLSDTSYITNALVNHLTFSNSKYKYSVVSVNGKQTSNLRNQIAFVGIKNNKETEREWKRPEGFKSINSNDFLIREEGKNDVKDDVLIKDRSFNGHHAEDAYFITIISQYFRSFKRIERLNVNYRKETRELDDLEKNNIKFKEKASFDNFLLINALDELNEKLNQMRFSRMVITKKNTQLFNETLYSGKYDKGKNTIKKVEKLNLLDNRTDKIKKIEEFFDEDKLKENELTKLHIFNHDKNLYETLKIIWNEVKIEIKNKNLNEKNYFKYFVNKKLQEGKISFNEWVPILDNDFKIIRKIRYIKFSSEEKETDEIIFSQSNFLKIDQRQNFSFHNTLYWVQIWVYKNQKDQYCFISIDARNSKFEKDEIKINYEKLKTQKEKLQIINEEPILKINKGDLFENEEKELFYIVGRDEKPQKLEIKYILGKKIKDQKQIQKPVKKYFPNWKKVNLTYMGEIFKK

SEQ ID NO: 45 - protein, 1314 aa, Mycoplasma synoviae
MLRLYCANNLVLNNVQNLWKYLLLLIFDKKIIFLFKIKVILIRRYMENNNKEKIVIGFDLGVASVGWSIVNAETKEVIDLGVRLFSEPEKADYRRAKRTTRRLLRRKKFKREKFHKLILKNAEIFGLQSRNEILNVYKDQSSKYRNILKLKINALKEEIKPSELVWILRDYLQNRGYFYKNEKLTDEFVSNSFPSKKLHEHYEKYGFFRGSVKLDNKLDNKKDKAKEKDEEEESDAKKESEELIFSNKQWINEIVKVFENQSYLTESFKEEYLKLFNYVRPFNKGPGSKNSRTAYGVFSTDIDPETNKFKDYSNIWDKTIGKCSLFEEEIRAPKNLPSALIFNLQNEICTIKNEFTEFKNWWLNAEQKSEILKFVFTELFNWKDKKYSDKKFNKNLQDKIKKYLLNFALENFNLNEEILKNRDLENDTVLGLKGVKYYEKSNATADAALEFSSLKPLYVFIKFLKEKKLDLNYLLGLENTEILYFLDSIYLAISYSSDLKERNEWFKKLLKELYPKIKNNNLEIIENVEDIFEITDQEKFESFSKTHSLSREAFNHIIPLLLSNNEGKNYESLKHSNEELKKRTEKAELKAQQNQKYLKDNFLKEALVPLSVKTSVLQAIKIFNQIIKNFGKKYEISQVVIEMARELTKPNLEKLLNNATNSNIKILKEKLDQTEKFDDFTKKKFIDKIENSVVFRNKLFLWFEQDRKDPYTQLDIKINEIEDETEIDHVIPYSKSADDSWFNKLLVKKSTNQLKKNKTVWEYYQNESDPEAKWNKFVAWAKRIYLVQKSDKESKDNSEKNSIFKNKKPNLKFKNITKKLFDPYKDLGFLARNLNDTRYATKVFRDQLNNYSKHHSKDDENKLFKVVCMNGSITSFLRKSMWRKNEEQVYRFNFWKKDRDQFFHHAVDASIIAIFSLLTKTLYNKLRVYESYDVQRREDGVYLINKETGEVKKADKDYWKDQHNFLKIRENAIEIKNVLNNVDFQNQVRYSRKANTKLNTQLFNETLYGVKEFENNFYKLEKVNLFSRKDLRKFILEDLNEESEKNKKNENGSRKRILTEKYIVDEILQILENEEFKDSKSDINALNKYMDSLPSKFSEFFSQDFINKCKKENSLILTFDAIKHNDPKKVIKIKNLKFFREDATLKNKQAVHKDSKNQIKSFYESYKCVGFIWLKNKNDLEESIFVPINSRVIHFGDKDKDIFDFDSYNKEKLLNEINLKRPENKKFNSINEIEFVKFVKPGALLLNFENQQIYYISTLESSSLRAKIKLLNKMDKGKAVSMKKITNPDEYKIIEHVNPLGINLNWTKKLENNN

SEQ ID NO: 46 - protein, 641 aa, Nitrobacter hamburgensis
MHKRNSRSYRLGLDLGSNSLGWFVTHLEKRGDRYEPVALDPGGVRIFPDGRDPQSGMSNAVDRRMARGARKRRDRFVDPYALRKAALTNALPAHRVGRAIFHLNQRRGFQSNRKTDRKQSEDGAIKQAASKLKARMHEEAAPTLGAFFADMHLRKSYDDQQTAIRAELVRLGKDHLTGNARKKVWAKVRKRLFGDEVLRPKDTSDGARARATTTGTKASYDFYPTRAMLLDEFNAIWAAQREHHLAMTDEAKAEIEHIIFYHRPLKPAIVGKCTLDPATRPFKEDPEGYRAPWSHPLAQRFRILSEARNLEIRETGKTSRRLTKDQSDLVVAALLANREVKFDKLRTLLKLPAEARFNLESDRRSTATRPPHGCRTRRASIRRGAGFLRNGRSRSSPDWKKPKTKTNCSHGSKWNAHLTAQRPRASPIRRCRTAIAGSACAQSKRSCRSCRTSSMRMALRAPAITSWPSVPATTIPVDTFQQGGNAFGRILSVVTIELFAITDRVDPVQEQDARCFALRIAECRSDGLQHFAEVSLGLPPRNAAQDQRHSAGLCQSSCVGRFVPGTPCRRTPRSTSLHGKEPSAHAFGSTARSRPQLPASPRPCMSFRDGTSSSPARMPETLDRCAISRSNRSSVCRAERL

SEQ ID NO: 47 - protein, 1166 aa, Nitrobacter hamburgensis
MHVEIDFPHFSRGDSHLAMNKNEILRGSSVLYRLGLDLGSNSLGWFVTHLEKRGDRHEPVALGPGGVRIFPDGRDPQSGTSNAVDRRMARGARKRRDRFVERRKELIAALIKYNLLPDDARERRALEVLDPYALRKTALTDTLPAHHVGRALFHLNQRRGFQSNRKTDSKQSEDGAIKQAASRLATDKGNETLGVFFADMHLRKSYEDRQTAIRAELVRLGKDHLTGNARKKIWAKVRKRLFGDEVLPRADAPHGVRARATITGTKASYDYYPTRDMLRDEFNAIWAGQSAHHATITDEARTEIEHIIFYQRPLKPAIVGKCTLDPATRPFKEDPEGYRAPWSHPLAQRFRILSEARNLEIRDTGKGSRRLTKEQSDLVVAALLANREVKFDKLRTLLKLPAEARFNLESDRRAALDGDQTAARLSDKKGFNKAWRGFPPERQIAIVARLEETEDENELIAWLEKECALDGAAAARVANTTLPDGHCRLGLRAIKKIVPIMQDGLDEDGVAGAGYHIAAKRAGYDHAKLPTGEQLGRLPYYGQWLQDAVVGSGDARDQKEKQYGQFPNPTVHIGLGQLRRVVNDLIDKYGPPTEISIEFTRALKLSEQQKAERQREQRRNQDKNKARAEELAKFGRPANPRNLLKMRLWEELAHDPLDRKCVYTGEQISIERLLSDEVDIDHILPVAMTLDDSPANKIICMRYANRHKRKQTPSEAFGSSPTLQGHRYNWDDIAARATGLPRNKRWRFDANAREEFDKRGGFLARQLNETGWLARLAKQYLGAVTDPNQIWVVPGRLTSMLRGKWGLNGLLPSDNYAGVQDKAEEFLASTDDMEFSGVKNRADHRHHAIDGLVTALTDRSLLWKMANAYDEEHEKFVIEPPWPTMRDDLKAALEKMVVSHKPDHGIEGKLHEDSAYGFVKPLDATGLKEEEAGNLVYRKAIESLNENEVDRIRDIQLRTIVRDHVNVEKTKGVALADALRQLQAPSDDYPQFKHGLRHVRILKKEKGDYLVPIANRASGVAYKAYSAGENFCVEVFETAGGKWDGEAVRRFDANKKNAGPKIAHAPQWRDANEGAKLVMRIHKGDLIRLDHEGRARIMVVHRLDAAAGRFKLADHNETGNLDKRHATNNDIDPFRWLMASYNTLKKLAAVPVRVDELGRVWRVMPN

SEQ ID NO: 48 - protein, 1082 aa, Neisseria meningitidis Z2491
MAAFKPNPINYILGLDIGIASVGWAMVEIDEDENPICLIDLGVRVFERAEVPKTGDSLAMARRLARSVRRLTRRRAHRLLRARRLLKREGVLQAADFDENGLIKSLPNTPWQLRAAALDRKLTPLEWSAVLLHLIKHRGYLSQRKNEGETADKELGALLKGVADNAHALQTGDFRTPAELALNKFEKESGHIRNQRGDYSHTFSRKDLQAELILLFEKQKEFGNPHVSGGLKEGIETLLMTQRPALSGDAVQKMLGHCTFEPAEPKAAKNTYTAERFIWLTKLNNLRILEQGSERPLTDTERATLMDEPYRKSKLTYAQARKLLGLEDTAFFKGLRYGKDNAEASTLMEMKAYHAISRALEKEGLKDKKSPLNLSPELQDEIGTAFSLFKTDEDITGRLKDRIQPEILEALLKHISFDKFVQISLKALRRIVPLMEQGKRYDEACAEIYGDHYGKKNTEEKIYLPPIPADEIRNPVVLRALSQARKVINGVVRRYGSPARIHIETAREVGKSFKDRKEIEKRQEENRKDREKAAAKFREYFPNFVGEPKSKDILKLRLYEQQHGKCLYSGKEINLGRLNEKGYVEIDHALPFSRTWDDSFNNKVLVLGSENQNKGNQTPYEYFNGKDNSREWQEFKARVETSRFPRSKKQRILLQKFDEDGFKERNLNDTRYVNRFLCQFVADRMRLTGKGKKRVFASNGQITNLLRGFWGLRKVRAENDRHHALDAVVVACSTVAMQQKITRFVRYKEMNAFDGKTIDKETGEVLHQKTHFPQPWEFFAQEVMIRVFGKPDGKPEFEEADTPEKLRTLLAEKLSSRPEAVHEYVTPLFVSRAPNRKMSGQGHMETVKSAKRLDEGVSVLRVPLTQLKLKDLEKMVNREREPKLYEALKARLEAHKDDPAKAFAEPFYKYDKAGNRTQQVKAVRVEQVQKTGVWVRNHNGIADNATMVRVDVFEKGDKYYLVPIYSWQVAKGILPDRAVVQGKDEEDWQLIDDSFNFKFSLHPNDLVEVITKKARMFGYFASCHRGTGNINIRIHDLDHKIGKNGILEGIGVKTALSFQKYQIDELGKEIRPCRLKKRPPVR

SEQ ID NO: 49 - protein, 1082 aa, Neisseria meningitidis
MAAFKPNPINYILGLDIGIASVGWAMVEIDEEENPIRLIDLGVRVFERAEVPKTGDSLAMVRRLARSVRRLTRRRAHRLLRARRLLKREGVLQAADFDENGLIKSLPNTPWQLRAAALDRKLTPLEWSAVLLHLIKHRGYLSQRKNEGETADKELGALLKGVADNAHALQTGDFRTPAELALNKFEKESGHIRNQRGDYSHTFSRKDLQAELILLFEKQKEFGNPHISGGLKEGIETLLMTQRPALSGDAVQKMLGHCTFEPAEPKAAKNTYTAERFIWLTKLNNLRILEQGSERPLTDTERATLMDEPYRKSKLTYAQARKLLGLEDTAFFKGLRYGKDNAEASTLMEMKAYHAISRALEKEGLKDKKSPLNLSPELQDEIGTAFSLFKTDEDITGRLKDRIQPEILEALLKHISFDKFVQISLKALRRIVPLMEQGKRYDEACAEIYGDHYGKKNTEEKIYLPPIPADEIRNPVVLRALSQARKVINGVVRRYGSPARIHIETAREVGKSFKDRKEIEKRQEENRKDREKAAAKFREYFPNFVGEPKSKDILKLRLYEQQHGKCLYSGKEINLGRLNEKGYVEIDHALPFSRTWDDSFNNKVLVLGSENQNKGNQTPYEYFNGKDNSREWQEFKARVETSRFPRSKKQRILLQKFDEDGFKERNLNDTRYVNRFLCQFVADRMRLTGKGKKRVFASNGQITNLLRGFWGLRKVRAENDRHHALDAVVVACSTVAMQQKITRFVRYKEMNAFDGKTIDKETGEVLHQKTHFPQPWEFFAQEVMIRVFGKPDGKPEFEEADTPEKLRTLLAEKLSSRPEAVHEYVTPLFVSRAPNRKMSGQGHMETVKSAKRLDEGVSVLRVPLTQLKLKDLEKMVNREREPKLYEALKARLEAHKDDPAKAFAEPFYKYDKAGNRTQQVKAVRVEQVQKTGVWVRNHNGIADNATMVRVDVFEKGDKYYLVPIYSWQVAKGILPDRAVVQGKDEEDWQLIDDSFNFKFSLHPNDLVEVITKKARMFGYFASCHRGTGNINIRIHDLDHKIGKNGILEGIGVKTALSFQKYQIDELGKEIRPCRLKKRPPVR

SEQ ID NO: 50 - protein, 1037 aa, Parvibaculum lavamentivorans
MERIFGFDIGTTSIGFSVIDYSSTQSAGNIQRLGVRIFPEARDPDGTPLNQQRRQKRMMRRQLRRRRIRRKALNETLHEAGFLPAYGSADWPVVMADEPYELRRRGLEEGLSAYEFGRAIYHLAQHRHFKGRELEESDTPDPDVDDEKEAANERAATLKALKNEQTTLGAWLARRPPSDRKRGIHAHRNVVAEEFERLWEVQSKFHPALKSEEMRARISDTIFAQRPVFWRKNTLGECRFMPGEPLCPKGSWLSQQRRMLEKLNNLAIAGGNARPLDAEERDAILSKLQQQASMSWPGVRSALKALYKQRGEPGAEKSLKFNLELGGESKLLGNALEAKLADMFGPDWPAHPRKQEIRHAVHERLWAADYGETPDKKRVIILSEKDRKAHREAAANSFVADFGITGEQAAQLQALKLPTGWEPYSIPALNLFLAELEKGERFGALVNGPDWEGWRRTNFPHRNQPTGEILDKLPSPASKEERERISQLRNPTVVRTQNELRKVVNNLIGLYGKPDRIRIEVGRDVGKSKREREEIQSGIRRNEKQRKKATEDLIKNGIANPSRDDVEKWILWKEGQERCPYTGDQIGFNALFREGRYEVEHIWPRSRSFDNSPRNKTLCRKDVNIEKGNRMPFEAFGHDEDRWSAIQIRLQGMVSAKGGTGMSPGKVKRFLAKTMPEDFAARQLNDTRYAAKQILAQLKRLWPDMGPEAPVKVEAVTGQVTAQLRKLWTLNNILADDGEKTRADHRHHAIDALTVACTHPGMTNKLSRYWQLRDDPRAEKPALTPPWDTIRADAEKAVSEIVVSHRVRKKVSGPLHKETTYGDTGTDIKTKSGTYRQFVTRKKIESLSKGELDEIRDPRIKEIVAAHVAGRGGDPKKAFPPYPCVSPGGPEIRKVRLTSKQQLNLMAQTGNGYADLGSNHHIAIYRLPDGKADFEIVSLFDASRRLAQRNPIVQRTRADGASFVMSLAAGEAIMIPEGSKKGIWIVQGVWASGQVVLERDTDADHSTTTRPMPNPILKDDAKKVSIDPIGRVRPSND

SEQ ID NO: 51 - protein, 1056 aa, Pasteurella multocida
MQTTNLSYILGLDLGIASVGWAVVEINENEDPIGLIDVGVRIFERAEVPKTGESLALSRRLARSTRRLIRRRAHRLLLAKRFLKREGILSTIDLEKGLPNQAWELRVAGLERRLSAIEWGAVLLHLIKHRGYLSKRKNESQTNNKELGALLSGVAQNHQLLQSDDYRTPAELALKKFAKEEGHIRNQRGAYTHTFNRLDLLAELNLLFAQQHQFGNPHCKEHIQQYMTELLMWQKPALSGEAILKMLGKCTHEKNEFKAAKHTYSAERFVWLTKLNNLRILEDGAERALNEEERQLLINHPYEKSKLTYAQVRKLLGLSEQAIFKHLRYSKENAESATFMELKAWHAIRKALENQGLKDTWQDLAKKPDLLDEIGTAFSLYKTDEDIQQYLTNKVPNSVINALLVSLNFDKFIELSLKSLRKILPLMEQGKRYDQACREIYGHHYGEANQKTSQLLPAIPAQEIRNPVVLRTLSQARKVINAIIRQYGSPARVHIETGRELGKSFKERREIQKQQEDNRTKRESAVQKFKELFSDFSSEPKSKDILKFRLYEQQHGKCLYSGKEINIHRLNEKGYVEIDHALPFSRTWDDSFNNKVLVLASENQNKGNQTPYEWLQGKINSERWKNFVALVLGSQCSAAKKQRLLTQVIDDNKFIDRNLNDTRYIARFLSNYIQENLLLVGKNKKNVFTPNGQITALLRSRWGLIKARENNNRHHALDAIVVACATPSMQQKITRFIRFKEVHPYKIENRYEMVDQESGEIISPHFPEPWAYFRQEVNIRVFDNHPDTVLKEMLPDRPQANHQFVQPLFVSRAPTRKMSGQGHMETIKSAKRLAEGISVLRIPLTQLKPNLLENMVNKEREPALYAGLKARLAEFNQDPAKAFATPFYKQGGQQVKAIRVEQVQKSGVLVRENNGVADNASIVRTDVFIKNNKFFLVPIYTWQVAKGILPNKAIVAHKNEDEWEEMDEGAKFKFSLFPNDLVELKTKKEYFFGYYIGLDRATGNISLKEHDGEISKGKDGVYRVGVKLALSFEKYQVDELGKNRQICRPQQRQPVR

SEQ ID NO: 52 - protein, 1066 aa, Rhodopseudomonas palustris BisB18
MSERVVRRILGIDLGIASCGWGVVDISGAGGGIIATGVRCFDAPLIDKTGEPKSATRRTARGQRRIVRRRRQRMNGVRRLLCEFGLLPDPRPDALNQAMRRISTASAAAQVTPWTLRAAAHQRLLSNEELAVVLGHIARHRGFRSNAKNEAGANAADETSKMKKAMEATREGLAKYHAFGDMIANDPKFANRKRNRDKDYSHTAKRSDLEDEVRAILRAQLRFGSAAATETLAQTFADVAFFQRPLQDSEDRVGDCPFEPGQKRAARRAPSFELFRFLSRLANLKLAVGRSPERRLTAEEIALAAKGFGETKKTITFKSLREALDLDPNARFSGIGKDKEASLDVVARTGGAAYGTKTLKDALGDAPWRSLSRTPETLDRIAEILSFREDITSIRNGLEDLGLDSLVVEALMQAAANGDFKEFTRAGHISARAARNIIPGLREGLVYSEACARVGYDHAARLSVPLDQVGSPVTRKALSEALKQVRAVAREYGPIDYFHIELARSVGKSAEERKQLTDGIEARNVEKAKRRKQAEEHLGRAPSDDELLRYELAKEQNFKCIYSGDAIDPAGVAANDTRYQVDHILPWSRFGDDSYLNKTLCTARSNQNKRGRTPFEWFEADKTDVEWMEYVARVENLQEVKGRKKRNYSIKDAAAIEDKFKARNLTDTQWATRLLADELSRMFPPRECERAICGRADGGNDGLTIVEERRVFTRPGAITSKLRRAWGLEGLKKQDGKRVEDDRHHAVDALVLAATTESLLQRLTVEVQRREREGRPDDIFHCAEPWRGFRADVRRTVYGSETMPGIFVSRAERRRARGKAHDATIKQIREIEGERLVFERKPVEKLTDKDLEKIPIPKPYGQVSDPKRLRDELVESLRAWIAAGKPKDRPPLSPKGDVIRKVRIQTNDKVSVEINGGTVDRGDMARVDVFRKKNKKAVWEYYVVPIYPHQIVALNDPPDRAVIAYAEDKDWKEIDSSYEFLWSLFGLSYVEISKANGECIDGYFRGLHRGTGAASVCKHISLGKDATVSGIGLKTLASFKKFTIDRLGRKFEIPREVRTWRGEACT

SEQ ID NO: 53 - protein, 1064 aa, Rhodopseudomonas palustris BisB5
MSECVTRRILGIDLGIASCGWGVIEVGEASGSIIASGVRCFDAPLIDKTGEPKSATRRTARGQRRIIRRRRQRMNAVRRLLAEFGVLTGRSPDALHQALLRLSQSVAGSQVTPWTLRAAAHERKLTNDELAVVLGHIARHRGFRSNSKNDGGANAADETSKMKKAMETTREGLARYHSFGAMIASDPKFADRKRNRDKDYSHTAKRSDLEDEVRTIFRSQTRFGSLVASEKLSQAFADAAFFQRPLQDSEDMVGSCPFEPGQKRTARRAPSFELFRFLSRLANLKLTVGRAPERRLTPDEIALAAKGFGETKKSITFKSLREALDLDPNARFSGVAKEKESTLDVAARTGGAAYGTKTLKDALGDAPWRSLSRMPEKLDRIAEILSFREDMKAIRNGLEEVGLDGLVVDALMQATANGDFKDFTRAAHISALAARNIIPGLREGLVYSDACTRVGYDHAARPAVPLSQIGSPVTRKALSEALKQVRAVAREYGPIDYFHIELARSIGKSAEERKKLTDGIEARNVEKEKRRKEAAEHLGRAPSDDELLRYELAKEQNFKCIYSGDPIDPAGISANDTRYQVDHILPWSRFGDDSYVNKTLCTARSNQNKRGRTPFEWFDADKTEAEWMEYSARVEDLKEVKGRKKRNYSIKDAASVEDKFKARNLTDTQWATRLLADELKRMFPPRECERVVTVRADGGNDGLSIVEERRVFTRPGAITSKLRRAWGLEGLKKQDGKRVEDDRHHAVDALVLAATTESLLNRLTVEVQQREREGRQDDIFHCSQPWPGFRVDVQRTVYGSETMPGIFVSRAERRRARGKAHDATVKQIRDIDGERIVFERKPIEKLTDKDLERIPVPEPYGKAADPKKLRDELVENLRAWIAAGKPKDKPPRSPKGDIIRKVRIETKDKVAVEINGGTVDRGDMARVDVFRKKNKKGVWEFYVIPIYPHQIVASALPPNRAVIAYKAESEWTAIDGCFEFAWSLNPMSYLELVKSNGELIEGYFRSMDRTTGAINLSPMSTNSETIRSIGVKTLSSFRKFTVDRLGRKFEIPREVRTWRGEACT

SEQ ID NO: 54 - protein, 1173 aa, Rhodospirillum rubrum
MRPIEPWILGLDIGTDSLGWAVFSCEEKGPPTAKELLGGGVRLFDSGRDAKDHTSRQAERGAFRRARRQTRTWPWRRDRLIALFQAAGLTPPAAETRQIALALRREAVSRPLAPDALWAALLHLAHHRGFRSNRIDKRERAAAKALAKAKPAKATAKATAPAKEADDEAGFWEGAEAALRQRMAASGAPTVGALLADDLDRGQPVRMRYNQSDRDGVVAPTRALIAEELAEIVARQSSAYPGLDWPAVTRLVLDQRPLRSKGAGPCAFLPGEDRALRALPTVQDFIIRQTLANLRLPSTSADEPRPLTDEEHAKALALLSTARFVEWPALRRALGLKRGVKFTAETERNGAKQAARGTAGNLTEAILAPLIPGWSGWDLDRKDRVFSDLWAARQDRSALLALIGDPRGPTRVTEDETAEAVADAIQIVLPTGRASLSAKAARAIAQAMAPGIGYDEAVTLALGLHHSHRPRQERLARLPYYAAALPDVGLDGDPVGPPPAEDDGAAAEAYYGRIGNISVHIALNETRKIVNALLHRHGPILRLVMVETTRELKAGADERKRMIAEQAERERENAEIDVELRKSDRWMANARERRQRVRLARRQNNLCPYTSTPIGHADLLGDAYDIDHVIPLARGGRDSLDNMVLCQSDANKTKGDKTPWEAFHDKPGWIAQRDDFLARLDPQTAKALAWRFADDAGERVARKSAEDEDQGFLPRQLTDTGYIARVALRYLSLVTNEPNAVVATNGRLTGLLRLAWDITPGPAPRDLLPTPRDALRDDTAARRFLDGLTPPPLAKAVEGAVQARLAALGRSRVADAGLADALGLTLASLGGGGKNRADHRHHFIDAAMIAVTTRGLINQINQASGAGRILDLRKWPRTNFEPPYPTFRAEVMKQWDHIHPSIRPAHRDGGSLHAATVFGVRNRPDARVLVQRKPVEKLFLDANAKPLPADKIAEIIDGFASPRMAKRFKALLARYQAAHPEVPPALAALAVARDPAFGPRGMTANTVIAGRSDGDGEDAGLITPFRANPKAAVRTMGNAVYEVWEIQVKGRPRWTHRVLTRFDRTQPAPPPPPENARLVMRLRRGDLVYWPLESGDRLFLVKKMAVDGRLALWPARLATGKATALYAQLSCPNINLNGDQGYCVQSAEGIRKEKIRTTSCTALGRLRLSKKAT

SEQ ID NO: 55 - protein, 1370 aa, Streptococcus agalactiae 2603V/R
MNKPYSIGLDIGTNSVGWSIITDDYKVPAKKMRVLGNTDKEYIKKNLIGALLFDGGNTAADRRLKRTARRRYTRRRNRILYLQEIFAEEMSKVDDSFFHRLEDSFLVEEDKRGSKYPIFATLQEEKDYHEKFSTIYHLRKELADKKEKADLRLIYIALAHIIKFRGHFLIEDDSFDVRNTDISKQYQDFLEIFNTTFENNDLLSQNVDVEAILTDKISKSAKKDRILAQYPNQKSTGIFAEFLKLIVGNQADFKKYFNLEDKTPLQFAKDSYDEDLENLLGQIGDEFADLFSAAKKLYDSVLLSGILTVIDLSTKAPLSASMIQRYDEHREDLKQLKQFVKASLPEKYQEIFADSSKDGYAGYIEGKTNQEAFYKYLSKLLTKQEDSENFLEKIKNEDFLRKQRTFDNGSIPHQVHLTELKAIIRRQSEYYPFLKENQDRIEKILTFRIPYYIGPLAREKSDFAWMTRKTDDSIRPWNFEDLVDKEKSAEAFIHRMTNNDFYLPEEKVLPKHSLIYEKFTVYNELTKVRYKNEQGETYFFDSNIKQEIFDGVFKEHRKVSKKKLLDFLAKEYEEFRIVDVIGLDKENKAFNASLGTYHDLEKILDKDFLDNPDNESILEDIVQTLTLFEDREMIKKRLENYKDLFTESQLKKLYRRHYTGWGRLSAKLINGIRDKESQKTILDYLIDDGRSNRNFMQLINDDGLSFKSIISKAQAGSHSDNLKEVVGELAGSPAIKKGILQSLKIVDELVKVMGYEPEQIVVEMARENQTTNQGRRNSRQRYKLLDDGVKNLASDLNGNILKEYPTDNQALQNERLFLYYLQNGRDMYTGEALDIDNLSQYDIDHIIPQAFIKDDSIDNRVLVSSAKNRGKSDDVPSLEIVKDCKVFWKKLLDAKLMSQRKYDNLTKAERGGLTSDDKARFIQRQLVETRQITKHVARILDERFNNELDSKGRRIRKVKIVTLKSNLVSNFRKEFGFYKIREVNNYHHAHDAYLNAVVAKAILTKYPQLEPEFVYGDYPKYNSYKTRKSATEKLFFYSNIMNFFKTKVTLADGTVVVKDDIEVNNDTGEIVWDKKKHFATVRKVLSYPQNNIVKKTEIQTGGFSKESILAHGNSDKLIPRKTKDIYLDPKKYGGFDSPIVAYSVLVVADIKKGKAQKLKTVTELLGITIMERSRFEKNPSAFLESKGYLNIRADKLIILPKYSLFELENGRRRLLASAGELQKGNELALPTQFMKFLYLASRYNESKGKPEEIEKKQEFVNQHVSYFDDILQLINDFSKRVILADANLEKINKLYQDNKENISVDELANNIINLFTFTSLGAPAAFKFFDKIVDRKRYTSTKEVLNSTLIHQSITGLYETRIDLGKLGED

SEQ ID NO: 56 - protein, 1370 aa, Streptococcus agalactiae A909; identical to SEQ ID NO: 55

SEQ ID NO: 57 - protein, 1259 aa, Streptobacillus moniliformis
MKYILGLDLGVASIGWAVTEINEKGEPVGLIDANSVIFKPLDNDKGKLYNVERRDKRGSRRILRRKKHRVERTKMLLVNSSFLTNEEIDNLYVGKLDNIYEVRLKGLKEQLSKNEIARLMIYYCKNRGFKSNRKTEDLEILKSLGEKISEKDSDEKKLKPIIAKNTELIESKGLTPIEVIYMIRENDNSILGFKNKEGNYKFGFKRNQVIDEVRKILGTQQILSKEIVDEYIDILSSQRDFSDGPGGDSKYKIDYTKLAGKCKYTGEVRAVKSAPSYEIFTMLQKLNDIRYVKFTSEDKIEKKKLSKEVIHKLYDLVVEKNKTLTYDLIEKSIDEENIKLLNIPKLSKSKYVELRKSYFKERNDNENLTEEEINAFNEKLNNERMKQELIRNNLKAYKELKSKFKKNNIDENRIKELGGIYFLDLVAELLTYSKTDEKLEYFVENVERYSLFKEQRDIVEIIKTFPNYTKNGNLSLSLVRELNKLLMEGHDYESSLSSLNYYIDTDVDWEKFPTISEIEDSLSTKITNPNVKHILVILRKLYNTLLFKYGRPEKVHLELSRDFSNDFSTRNKIQKEQLENKVRREVAAFEMYGANKDIVAGKDRLSNDDFVRIKLWEEQNKVCMYSGRTIEKYQLTSAEVQIDHILPYSKSFDNSYSNKVLVFSNENQDKKERTPYQWLKGTEKWNEFKQRVRLNLNISNKKKENLLFEDEVVNNEFLERELHATSYSSRLALNIFQRLIPVSDEDKYDEHGNEKVKYLYNRNVIAFQGKMTSMLRNLYSLNKYTHSFESDTLDIDNKAFILKEFEINKDNLKMTAYNVNTGLEITSETKVEKNKSGEFKTIKDELLKKELDKKENLIEISDYFKDKVLFDLKIVDFEEIDTVEPEIISILYKMITALKEEVYSKNRENHLHHSLDAFLLTIMNRSMQMKLIKYNQLISVLKNKEIEIFNEEKGEYIDSKEFAEELQKQKIIDIDGNERGIKFNVNGKTHRLNLVKPYENFLDDIKNKIFDKRENNKLPYHVVKSKVSGALHAETILGESKGEITKRISVFDINYKNLGKIFDKDGSQKEIYETLVKWLEAKSKDYPKLKNGNIIKKVKIVDGNKDKLIKLGNKRYVEMGRTTVKILVLKKEAEEGLKFASIGRYKYNLLKSEKDVNISIWKDAIHFCKVRYNKLKENGYRLIHELIPGETIELELNKGNISKCLVVGFSGGKIEISSVIGDALDLINDKISTRIKERYYITVSTIKSIKKINKNILGD

SEQ ID NO: 58 - protein, 1344 aa, Streptococcus mutans
MKKPYSIGLDIGTNSVGWAVVTDDYKVPAKKMKVLGNTDKSHIEKNLLGALLFDSGNTAEDRRLKRTARRRYTRRRNRILYLQEIFSEEMGKVDDSFFHRLEDSFLVTEDKRGERHPIFGNLEEEVKYHENFPTIYHLRQYLADNPEKVDLRLVYLALAHIIKFRGHFLIEGKFDTRNNDVQRLFQEFLAVYDNTFENSSLQEQNVQVEEILTDKISKSAKKDRVLKLFPNEKSNGRFAEFLKLIVGNQADFKKHFELEEKAPLQFSKDTYEEELEVLLAQIGDNYAELFLSAKKLYDSILLSGILTVTDVGTKAPLSASMIQRYNEHQMDLAQLKQFIRQKLSDKYNEVFSDVSKDGYAGYIDGKTNQEAFYKYLKGLLNKIEGSGYFLDKIEREDFLRKQRTFDNGSIPHQIHLQEMRAIIRRQAEFYPFLADNQDRIEKLLTFRIPYYVGLARGKSDFAWLSRKSADKITPWNFDEIVDKESSAEAFINRMTNYDLYLPNQKVLPKHSLLYEKFTVYNELTKVKYKTEQGKTAFFDANMKQEIFDGVFKVYRKVTKDKLMDFLEKEFDEFRIVDLTGLDKENKVFNASYGTYHDLCKILDKDFLDNSKNEKILEDIVLTLTLFEDREMIRKRLENYSDLLTKEQVKKLERRHYTGWGRLSAELIHGIRNKESRKTILDYLIDDGNSNRNFMQLINDDALSFKEEIAKAQVIGETDNLNQVVSDIAGSPAIKKGILQSLKIVDELVKIMGHQPENIVVEMARENQFTNQGRRNSQQRLKGLTDSIKEFGSQILKEHPVENSQLQNDRLFLYYLQNGRDMYTGEELDIDYLSQYDIDHIIPQAFIKDNSIDNRVLTSSKENRGKSDDVPSKDVVRKMKSYWSKLLSAKLITQRKFDNLTKAERGGLTDDDKAGFIKRQLVETRQITKHVARILDERFNTETDENNKKIRQVKIVTLKSNLVSNFRKEFELYKVREINDYHHAHDAYLNAVIGKALLGVYPQLEPEFVYGDYPHFHGHKENKATAKKFFYSNIMNFFKKDDVRTDKNGEIIWKKDEHISNIKKVLSYPQVNIVKKVEEQTGGFSKESILPKGNSDKLIPRKTKKFYWDTKKYGGFDSPIVAYSILVIADIEKGKSKKLKTVKALVGVTIMEKMTFERDPVAFLERKGYRNVQEENIIKLPKYSLFKLENGRKRLLASARELQKGNEIVLPNHLGTLLYHAKNIHKVDEPKHLDYVDKHKDEFKELLDVVSNFSKKYTLAEGNLEKIKELYAQNNGEDLKELASSFINLLTFTAIGAPATFKFFDKNIDRKRYTSTTEILNATLIHQSITGLYETRIDLNKLGGD

SEQ ID NO: 59 - protein, 1368 aa, Streptococcus pyogenes SSI1
MDKKYSIGLDIGTNSVGWAVITDDYKVPSKKLKGLGNTDRHGIKKNLIGALLFDSGETAEATRLKRTARRRYTRRKNRICYLQEIFSNEMAKVDDSFFHRLEESFLVEEDKKHERHPIFGNIVDEVAYHEKYPTIYHLRKKLADSTDKVDLRLIYLALAHMIKFRGHFLIEGDLNPDNSDVDKLFIQLVQTYNQLFEENPINASRVDAKAILSARLSKSRRLENLIAQLPGEKKNGLFGNLIALSLGLTPNFKSNFDLAEDAKLQLSKDTYDDDLDNLLAQIGDQYADLFLAAKNLSDATLLSDILRVNSEITKAPLSASMIKRYDEHHQDLTLLKALVRQQLPEKYKEIFFDQSKNGYAGYIDGGASQEEFYKFIKPILEKMDGTEELLAKLNREDLLRKQRTFDNGSIPYQIHLGELHAILRRQEDFYPFLKDNREKIEKILTFRIPYYVGPLARGNSRFAWMTRKSEETITPWNFEEVVDKGASAQSFIERMTNFDKNLPNEKVLPKHSLLYEYFTVYNELTKVKYVTEGMRKPAFLSGEQKKAIVDLLFKTNRKVTVKQLKEDYFKKIECFDSVEISGVEDRFNASLGTYHDLLKIIKDKDFLDNEENEDILEDIVLTLTLFEDREMIEERLKTYAHLFDDKVMKQLKRRRYTGWGRLSRKLINGIRDKQSGKTILDFLKSDGFANRNFMQLIHDDSLTFKEDIQKAQVSGQGDSLHEHIANLAGSPAIKKGILQTVKVVDELVKVMGRHKPENIVIEMARENQTTQKGQKNSRERMKRIEEGIKELGSDILKEYPVENTQLQNEKLYLYYLQNGRDMYVDQELDINRLSDYDVDHIVPQSFLKDDSIDNKVLTRSDKNRGKSDNVPSEEVVKKMKNYWRQLLNAKLITQRKFDNLTKAERGGLSELDKVGFIKRQLVETRQITKHVAQILDSRMNTKYDENDKLIREVRVITLKSKLVSDFRKDFQFYKVREINNYHHAHDAYLNAVVGTALIKKYPKLESEFVYGDYKVYDVRKMIAKSEQEIGKATAKYFFYSNIMNFFKTEITLANGEIRKRPLIETNGETGEIVWDKGRDFATVRKVLSMPQVNIVKKTEVQTGGFSKESILPKRNSDKLIARKKDWDPKKYGGFDSPTVAYSVLVVAKVEKGKSKKLKSVKELLGITIMERSSFEKDPIDFLEAKGYKEVRKDLIIKLPKYSLFELENGRKRMLASAGELQKGNELALPSKYVNFLYLASHYEKLKGSPEDNEQKQLFVEQHKHYLDEIIEQISEFSKRVILADANLDKVLSAYNKHRDKPIREQAENIIHLFTLTNLGAPAAFKYFDTTIDRKRYTSTKEVLDATLIHQSITGLYETRIDLSQLGGD

SEQ ID NO: 60 - protein, 1368 aa, Streptococcus pyogenes NZ131
MDKKYSIGLDIGTNSVGWAVITDDYKVPSKKFKVLGNTDRHSIKKNLIGALLFDSGETAEATRLKRTARRRYTRRKNRICYLQEIFSNEIAKVDDSFFHRLEESFLVEEDKKHERHPIFGNIVDEVAYHEKYPTIYHLRKKLADSTDKADLRLIYLALAHMIKFRGHFLIEGDLNPDNSDVDKLFIQLVQTYNQLFEENPINASRVDAKAILSARLSKSRRLENLIAQLPGEKRNGLFGNLIALSLGLTPNFKSNFDLAEDAKLQLSKDTYDDDLDNLLAQIGDQYADLFLAAKNLSDAILLSDILRVNTEITKAPLSASMIKRYDEHHQDLTLLKALVRQQLPEKYKEIFFDQSKNGYAGYIDGGASQEEFYKFIKPILEKMDGTEELLAKLNREDLLRKQRTFDNGSIPHQIHLGELHAILRRQEDFYPFLKDNREKIEKILTFRIPYYVGPLARGNSRFAWMTRKSEETITPWNFEEVVDKGASAQSFIERMTNFDKNLPNEKVLPKHSLLYEYFTVYNELTKVKYVTEGMRKPAFLSGEQKKAIVDLLFKTNRKVTVKQLKEDYFKKIECFDSVEISGVEDRFNASLGTYHDLLKIIKDKDFLDNEENEDILEDIVLTLTLFEDREMIEERLKTYAHLFDDKVMKQLKRRRYTGWGRLSRKLINGIRDKQSGKTILDFLKSDGFANRNFMQLIHDDSLTFKEDLQKAQVSGQGDSLHEHIANLAGSPAIKKGILQTVKVVDELVKVMGRHKPENIVIEMARENQTTQKGQKNSRERMKRIEEGIKELGSDILKEYPVETTQLQNEKLYLYYLQNGRDMYVDQELDINRLSDYDVDHIVPQSFLKDDSIDNKVLTRSDKNRGKSDNVPSEEVVKKMKNYWKQLLNAKLITQRKFDNLTKAERGGLSELDKAGFIKRQLVETRQITKHVAQILDSRMNTKYDENDKLIREVRVITLKSKLVSDFRKDFQFYKVREINNYHHAHDAYLNAVVGTALIKKYPKLESEFVYGDYKVYDIRKMIAKSEQEIGKATAKYFFYSNIMNFFKTEITLANGEIRKRPLIETNGETGEIVWDKGRDFATVRKVLSMPQVNIVKKTEVQTGGFSKESILPKRNSDKLIARKKDWDPKKYGGFDSPTVAYSVLVVAKVEKGKSKKLKSVKELVGITIMERSSFEKDPVDFLEAKGYKEVRKDLIIKLPKYSLFELENGRKRMLASAGELQKGNELALPSKYVNFLYLASHYEKLKGSPEDNEQKQLFVEQHKHYLDEIIEQISEFSKRVILADANLDKVLSAYNKHRDKPIREQAENIIHLFTLTNLGAPAAFKCFDTTIGRNRYKSIKEVLDATLIHQSITGLYETRIDLSQLGGD

SEQ ID NO: 61 - protein, 1368 aa, Streptococcus pyogenes M1GAS [sequence omitted]

SEQ ID NO: 62 - protein, 1368 aa, Streptococcus pyogenes MGAS5005
MDKKYSIGLDIGTNSVGWAVITDDYKVPSKKFKVLGNTDRHSIKKNLIGALLFDSGETAEATRLKRTARRRYTRRKNRICYLQEIFSNEMAKVDDSFFHRLEESFLVEEDKKHERHPIFGNIVDEVAYHEKYPTIYHLRKKLVDSTDKADLRLIYLALAHMIKFRGHFLIEGDLNPDNSDVDKLFIQLVQTYNQLFEENPINASGVDAKAILSARLSKSRRLENLIAQLPGEKKNGLFGNLIALSLGLTPNFKSNFDLAEDAKLQLSKDTYDDDLDNLLAQIGDQYADLFLAAKNLSDAILLSDILRVNTEITKAPLSASMIKRYDEHHQDLTLLKALVRQQLPEKYKEIFFDQSKNGYAGYIDGGASQEEFYKFIKPILEKMDGTEELLVKLNREDLLRKQRTFDNGSIPHQIHLGELHAILRRQEDFYPFLKDNREKIEKILTFRIPYYVGPLARGNSRFAWMTRKSEETITPWNFEEVVDKGASAQSFIERMTNFDKNLPNEKVLPKHSLLYEYFTVYNELTKVKYVTEGMRKPAFLSGEQKKAIVDLLFKTNRKVTVKQLKEDYFKKIECFDSVEISGVEDRFNASLGTYHDLLKIIKDKDFLDNEENEDILEDIVLTLTLFEDREMIEERLKTYAHLFDDKVMKQLKRRRYTGWGRLSRKLINGIRDKQSGKTILDFLKSDGFANRNFMQLIHDDSLTFKEDIQKAQVSGQGDSLHEHIANLAGSPAIKKGILQTVKVVDELVKVMGRHKPENIVIEMARENQTTQKGQKNSRERMKRIEEGIKELGSQILKEHPVENTQLQNEKLYLYYLQNGRDMYVDQELDINRLSDYDVDHIVPQSFLKDDSIDNKVLTRSDKNRGKSDNVPSEEVVKKMKNYWRQLLNAKLITQRKFDNLTKAERGGLSELDKAGFIKRQLVETRQITKHVAQILDSRMNTKYDENDKLIREVKVITLKSKLVSDFRKDFQFYKVREINNYHHAHDAYLNAVVGTALIKKYPKLESEFVYGDYKVYDVRKMIAKSEQEIGKATAKYFFYSNIMNFFKTEITLANGEIRKRPLIETNGETGEIVWDKGRDFATVRKVLSMPQVNIVKKTEVQTGGFSKESILPKRNSDKLIARKKDWDPKKYGGFDSPTVAYSVLVVAKVEKGKSKKLKSVKELLGITIMERSSFEKNPIDFLEAKGYKEVKKDLIIKLPKYSLFELENGRKRMLASAGELQKGNELALPSKYVNFLYLASHYEKLKGSPEDNEQKQLFVEQHKHYLDEIIEQISEFSKRVILADANLDKVLSAYNKHRDKPIREQAENIIHLFTLTNLGAPAAFKYFDTTIDRKRYTSTKEVLDATLIHQSITGLYETRIDLSQLGGD

SEQ ID NO: 63 - protein, 1121 aa, Streptococcus thermophilus LMD9
MSDLVLGLDIGIGSVGVGILNKVTGEIIHKNSRIFPAAQAENNLVRRTNRQGRRLARRKKHRRVRLNRLFEESGLITDFTKISINLNPYQLRVKGLTDELSNEELFIALKNMVKHRGISYLDDASDDGNSSVGDYAQIVKENSKQLETKTPGQIQLERYQTYGQLRGDFTVEKDGKKHRLINVFPTSAYRSEALRILQTQQEFNPQITDEFINRYLEILTGKRKYYHGPGNEKSRTDYGRYRTSGETLDNIFGILIGKCTFYPDEFRAAKASYTAQEFNLLNDLNNLTVPTETKKLSKEQKNQIINYVKNEKAMGPAKLFKYIAKLLSCDVADIKGYRIDKSGKAEIHTFEAYRKMKTLETLDIEQMDRETLDKLAYVLTLNTEREGIQEALEHEFADGSFSQKQVDELVQFRKANSSIFGKGWHNFSVKLMMELIPELYETSEEQMTILTRLGKQKTTSSSNKTKYIDEKLLTEEIYNPVVAKSVRQAIKIVNAAIKEYGDFDNIVIEMARETNEDDEKKAIQKIQKANKDEKDAAMLKAANQYNGKAELPHSVFHGHKQLATKIRLWHQQGERCLYTGKTISIHDLINNSNQFEVDHILPLSITFDDSLANKVLVYATANQEKGQRTPYQALDSMDDAWSFRELKAFVRESKTLSNKKKEYLLTEEDISKFDVRKKFIERNLVDTRYASRVVLNALQEHFRAHKIDTKVSVVRGQFTSQLRRHWGIEKTRDTYHHHAVDALIIAASSQLNLWKKQKNTLVSYSEDQLLDIETGELISDDEYKESVFKAPYQHFVDTLKSKEFEDSILFSYQVDSKFNRKISDATIYATRQAKVGKDKADETYVLGKIKDIYTQDGYDAFMKIYKKDKSKFLMYRHDPQTFEKVIEPILENYPNKQINEKGKEVPCNPFLKYKEEHGYIRKYSKKGNGPEIKSLKYYDSKLGNHIDITPKDSNNKVVLQSVSPWRADVYFNKTTGKYEILGLKYADLQFEKGTGTYKISQEKYNDIKKKEGVDSDSEFKFTLYKNDLLLVKDTETKEQQLFRFLSRTMPKQKHYVELKPYDKQKFEGGEALIKVLGNVANSGQCKKGLGKSNISIYKVRTDVLGNQHIIKNEGDKPKLDF

SEQ ID NO: 64 - protein, 1388 aa, Streptococcus thermophilus LMD9
MTKPYSIGLDIGTNSVGWAVTTDNYKVPSKKMKVLGNTSKKYIKKNLLGVLLFDSGITAEGRRLKRTARRRYTRRRNRILYLQEIFSTEMATLDDAFFQRLDDSFLVPDDKRDSKYPIFGNLVEEKAYHDEFPTIYHLRKYLADSTKKADLRLVYLALAHMIKYRGHFLIEGEFNSKNNDIQKNFQDFLDTYNAIFESDLSLENSKQLEEIVKDKISKLEKKDRILKLFPGEKNSGIFSEFLKLIVGNQADFRKCFNLDEKASLHFSKESYDEDLETLLGYIGDDYSDVFLKAKKLYDAILLSGFLTVTDNETEAPLSSAMIKRYNEHKEDLALLKEYIRNISLKTYNEVFKDDTKNGYAGYIDGKTNQEDFYVYLKKLLAEFEGADYFLEKIDREDFLRKQRTFDNGSIPYQIHLQEMRAILDKQAKFYPFLAKNKERIEKILTFRIPYYVGPLARGNSDFAWSIRKRNEKITPWNFEDVIDKESSAEAFINRMTSFDLYLPEEKVLPKHSLLYETFNVYNELTKVRFIAESMRDYQFLDSKQKKDIVRLYFKDKRKVTDKDIIEYLHAIYGYDGIELKGIEKQFNSSLSTYHDLLNIINDKEFLDDSSNEAIIEEIIHTLTIFEDREMIKQRLSKFENIFDKSVLKKLSRRHYTGWGKLSAKLINGIRDEKSGNTILDYLIDDGISNRNFMQLIHDDALSFKKKIQKAQIIGDEDKGNIKEVVKSLPGSPAIKKGILQSIKIVDELVKVMGGRKPESIVVEMARENQYTNQGKSNSQQRLKRLEKSLKELGSKILKENIPAKLSKIDNNALQNDRLYLYYLQNGKDMYTGDDLDIDRLSNYDIDHIIPQAFLKDNSIDNKVLVSSASNRGKSDDVPSLEVVKKRKTFWYQLLKSKLISQRKFDNLTKAERGGLSPEDKAGFIQRQLVETRQITKHVARLLDEKFNNKKDENNRAVRTVKIITLKSTLVSQFRKDFELYKVREINDFHHAHDAYLNAVVASALLKKYPKLEPEFVYGDYPKYNSFRERKSATEKVYFYSNIMNIFKKSISLADGRVIERPLIEVNEETGESVWNKESDLATVRRVLSYPQVNVVKKVEEQNHGLDRGKPKGLFNANLSSKPKPNSNENLVGAKEYLDPKKYGGYAGISNSFTVLVKGTIEKGAKKKITNVLEFQGISILDRINYRKDKLNFLLEKGYKDIELIIELPKYSLFELSDGSRRMLASILSTNNKRGEIHKGNQIFLSQKFVKLLYHAKRISNTINENHRKYVENHKKEFEELFYYILEFNENYVGAKKNGKLLNSAFQSWQNHSIDELCSSFIGPTGSERKGLFELTSRGSAADFEFLGVKIPRYRDYTPSSLLKDATLIHQSVTGLYETRIDLAKLGEG

SEQ ID NO: 65 - protein, 1128 aa, Streptococcus thermophilus Z1066
MSDLVLGLDIGIGSVGVGILNKVTGEIIHKNSRIFPAAQAENNLVRRTNRQGRRLTRRKKHRIVRLNRLFEESGLITDFTKISINLNPYQLRVKGLTDELSNEELFIALKNMVKHRGISYLDDASDDGNSSVGDYAQIVKENSKQLETKTPGQIQLERYQTYGQLRGDFTVEKDGKKHRLINVFPTSAYRSEALRILQTQQEFNPQITDEFINRYLEILTGKRKYYHGPGNEKSRTDYGRYRTSGETLDNIFGILIGKCTFYPEEFRAAKASYTAQEFNLLNDLNNLTVPTETKKLSKEQKNQIINYVKNEKAMGPAKLFKYIAKLLSCDVADIKGYRIDKSGKAEIHTFEAYRKMKTLETLDIEQMDRETLDKLAYVLTLNTEREGIQEALEHEFADGSFSQKQVDELVQFRKANSSIFGKGWHNFSVKLMMELIPELYETSEEQMTILTRLGKQKRLRLQIKQNISNKTKYIDEKLLTEEIYNPVVAKSVRQAIKIVNAAIKEYGDFDNIVIEMARETNEDDEKKAIQKIQKANKDEKDAAMLKAANQYNGKAELPHSVFHGHKQLATKIRLWHQQGERCLYTGKTISIHDLINNPNQFEVDHILPLSITFDDSLANKVLVYATANQEKGQRTPYQALDSMDDAWSFRELKAFVRESKTLSNKKKEYLLTEEDISKFDVRKKFIERNLVDTRYASRVVLNALQEHFRAHKIDTKVSVVRGQFTSQLRRHWGIEKTRDTYHHHAVDALIIAASSQLNLWKKQKNTLVSYSEEQLLDIETGELISDDEYKESVFKAPYQHFVDTLKSKEFEDSILFSYQVDSKFNRKISDATIYATRQAKVGKDKKDETYVLGKIKDIYTQDGYDAFMKIYKKDKSKFLMYRHDPQTFEKVIEPILENYPNKQMNEKGKEVPCNPFLKYKEEHGYIRKYSKKGNGPEIKSLKYYDSKLLGNPIDITPENSKNKVVLQSLKPWRTDVYFNKATGKYEILGLKYADLQFEKGTGTYKISQEKYNDIKKKEGVDSDSEFKFTLYKNDLLLVKDTETKEQQLFRFLSRTLPKQKHYVELKPYDKQKFEGGEALIKVLGNVANGGQCIKGLAKSNISIYKVRTDVLGNQHIIKNEGDKPKLDF

SEQ ID NO: 66 - protein, 1122 aa, Streptococcus thermophilus 18311
MSDLVLGLDIGIGSVGVGILNKVTGEIIHKNSRIFPAAQAENNLVRRTNRQGRRLTRRKKHRIVRLNRLFEESGLITDFTKISINLNPYQLRVKGLTDELSNEELFIALKNMVKHRGISYLDDASDDGNSSVGDYAQIVKENSKQLETKTPGQIQLERYQTYGQLRGDFTVEKDGKKHRLINVFPTSAYRSEALRILQTQQEFNSQITDEFINRYLEILTGKRKYYHGPGNEKSRTDYGRYRTNGETLDNIFGILIGKCTFYPDEFRAAKASYTAQEFNLLNDLNNLTVPTETKKLSKEQKNQIINYVKNEKVMGPAKLFKYIAKLLSCDVADIKGHRIDKSGKAEIHTFEAYRKMKTLETLDIEQMDRETLDKLAYVLTLNTEREGIQEALEHEFADGSFSQKQVDELVQFRKANSSIFGKGWHNFSVKLMMELIPELYETSEEQMTILTRLGKQKTTSSSNKTKYIDEKLLTEEIYNPVVAKSVRQAIKIVNAAIKEYGDFDNIVIEMARETNEDDEKKAIQKIQKANKDEKDAAMLKAANQYNGKAELPHSVFHGHKQLATKIRLWHQQGERCLYTGKTISIHDLINNPNQFEVDHILPLSITFDDSLANKVLVYATANQEKGQRTPYQALDSMDDAWSFRELKAFVRESKTLSNKKKEYLLTEEDISKFDVRKKFIERNLVDTRYASRVVLNALQEHFRAHKIDTKVSVVRGQFTSQLRRHWGIEKTRDTYHHHAVDALIIAASSQLNLWKKQKNTLVSYSEEQLLDIETGELISDDEYKESVFKAPYQHFVDTLKSKEFEDSILFSYQVDSKFNRKISDATIYATRQAKVGKDKKDETYVLGKIKDIYTQDGYDAFMKIYKKDKSKFLMYRHDPQTFEKVIEPILENYPNKEMNEKGKEVPCNPFLKYKEEHGYIRKYSKKGNGPEIKSLKYYDSKLLGNPIDITPENSKNKVVLQSLKPWRTDVYFNKNTGKYEILGLKYADLQFEKKTGTYKISQEKYNGIMKEEGVDSDSEFKFTLYKNDLLLVKDTETKEQQLFRFLSRTMPNVKYYVELKPYSKDKFEKNESLIEILGSADKSGRCIKGLGKSNISIYKVRTDVLGNQHIIKNEGDKPKLDF

SEQ ID NO: 67 - protein, 1395 aa, Treponema denticola
MKKEIKDYFLGLDVGTGSVGWAVTDTDYKLLKANRKDLWGMRCFETAETAEVRRLHRGARRRIERRKKRIKLLQELFSQEIAKTDEGFFQRMKESPFYAEDKTILQENTLFNDKDFADKTYHKAYPTINHLIKAWIENKVKPDPRLLYLACHNIIKKRGHFLFEGDFDSENQFDTSIQALFEYLREDMEVDIDADSQKVKEILKDSSLKNSEKQSRLNKILGLKPSDKQKKAITNLISGNKINFADLYDNPDLKDAEKNSISFSKDDFDALSDDLASILGDSFELLLKAKAVYNCSVLSKVIGDEQYLSFAKVKIYEKHKTDLTKLKNVIKKHFPKDYKKVFGYNKNEKNNNNYSGYVGVCKTKSKKLIINNSVNQEDFYKFLKTILSAKSEIKEVNDILTEIETGTFLPKQISKSNAEIPYQLRKMELEKILSNAEKHFSFLKQKDEKGLSHSEKIIMLLTFKIPYYIGPINDNHKKFFPDRCWVVKKEKSPSGKTTPWNFFDHIDKEKTAEAFITSRTNFCTYLVGESVLPKSSLLYSEYTVLNEINNLQIIIDGKNICDIKLKQKIYEDLFKKYKKITQKQISTFIKHEGICNKTDEVIILGIDKECTSSLKSYIELKNIFGKQVDEISTKNMLEEIIRWATIYDEGEGKTILKTKIKAEYGKYCSDEQIKKILNLKFSGWGRLSRKFLETVTSEMPGFSEPVNIITAMRETQNNLMELLSSEFTFTENIKKINSGFEDAEKQFSYDGLVKPLFLSPSVKKMLWQTLKLVKEISHITQAPPKKIFIEMAKGAELEPARTKTRLKILQDLYNNCKNDADAFSSEIKDLSGKIENEDNLRLRSDKLYLYYTQLGKCMYCGKPIEIGHVFDTSNYDIDHIYPQSKIKDDSISNRVLVCSSCNKNKEDKYPLKSEIQSKQRGFWNFLQRNNFISLEKLNRLTRATPISDDETAKFIARQLVETRQATKVAAKVLEKMFPETKIVYSKAETVSMFRNKFDIVKCREINDFHHAHDAYLNIVVGNVYNTKFTNNPWNFIKEKRDNPKIADTYNYYKVFDYDVKRNNITAWEKGKTIITVKDMLKRNTPIYTRQAACKKGELFNQTIMKKGLGQHPLKKEGPFSNISKYGGYNKVSAAYYTLIEYEEKGNKIRSLETIPLYLVKDIQKDQDVLKSYLTDLLGKKEFKILVPKIKINSLLKINGFPCHITGKTNDSFLLRPAVQFCCSNNEVLYFKKIIRFSEIRSQREKIGKTISPYEDLSFRSYIKENLWKKTKNDEIGEKEFYDLLQKKNLEIYDMLLTKHKDTIYKKRPNSATIDILVKGKEKFKSLIIENQFEVILEILKLFSATRNVSDLQHIGGSKYSGVAKIGNKISSLDNCILIYQSITGIFEKRIDLLKV

SEQ ID NO: 68 - protein, 1032 aa, Artificial sequence
  /note="Description of artificial sequence: TGRD_056 (Csn1-like CRISPR-associated protein) of Uncultered bacterium TG1RsD17"
MLYHIANHRGTDSVRSFLEYDDDKIKENTLTAKIAKETKKVIDAKKYRTFGEYLYKGKIEKFQQNIRKKVSNRKTPANKNKEFAVTRDVIIKETEKILASQKQYYTYILTDEYIKKIKDAISYQTEKLIPESGYCPYFKDEKRLPRSHKLNEYRRMYEALNNAKYFDPVLDENTGEILSYQEKEFSREEKKILFDEVLLKGMELTESGAKKLLYHLPDGCEVQLQGRDKTTQKIKGYALVDLEASPFWLRLSQQQQDEFLYDWNSLPLEKLKPKLTNYYSLTESEVDETFQEIKLPSNYASVGKKAMEILLTYIKDGCSYTEALEKAVSEGKLKVDKQTMIYDSLPYYGKILKESTQKLIGKAFSKQFADRNYKEPDTNKNEREFGKIANPVVHQTLNELRKLINEIITVFGKKPLEIGLETTRELKKSKKNREYLSKQQNKNEYARNRIYKEYIEPHLSQIKSRQENPSKYISKFELLEEQNFICPFCSEKITPDDIINSKVDVEHIFPIEESEDITKNNLVIAHNECNADKGKKSPFDAFGDKTSGKYRWNCILHNAQKNLPHKVWRFYQGSLEKFLENKPMSRRFGTDNSYISKIAARYLACLFNDPYHSEIFCIKSSLIAQLRIAWDLNSIMVPLVKNILSEKELEEFKISKNKKIRIDNRHHALDAIVIAYANRGYHNFLNRIHAKEYKINYREKSWLSKILLPPLNRDLEDFKISVKDSIEKANVSIKHDHNTNGSLVKATAYKVYYSGAGEYIITTSKNVEEISFKEKEDPKDTLYRALCKFECRDIDIKDEKLIKKLKYNSTLYKKVQNNLSKAKQELEQDNKKTEEEGKKSQKITEVRIYKKACSLVKGQYIQCGSRLKDKFFAVKEPTEIKTGLGYDTGDNLFLDLYYDKTGKLCGEIIRKVNFNRNKPNYQKEGYTLFERIYQSDILEVDTSEDRISLKNKTGSAPSDRTFIKVNTFTEVNAYFDGKRDKIQIFFGNLLKSSFKNDSFFISSMQKYNVRKVILTSLGIIKYRSQILKNKEV

SEQ ID NO: 69 - protein, 1032 aa, Artificial sequence
  /note="Description of artificial sequence: TGRD_222 (CRISPR-associated protein Csn1) of Uncultered bacterium TG1RsD17"
MKKRILGLDIGIASVGWALVEFDDEFQDNKKKGTIIKSGVRIFTRAETPKERESLAKPRREARSQRRRIRRRVERLNSIRELFVKNGVVEEWSVSKKNPNNIYITLNQIKTPWQLRMESLDRKLTNEQFAVVLTHLAKHRGYKSLRKDDKAGKVLEAISQNKKRLNDSDYRTLGEMFCKNESYKEHKRNKGGEYINSVARELIEEEVEKIFVKQREKGNNFADVNTEREYLKIAFSQKPAGSISKMVGFCTFENGEKRAPRDSYSAELFKVLCTINNTTFTDMKTGEIRSFSKEEIGKTLETVKNVKDVKYAKIRKDLGLEDSVKFSGVDYRENAKSKGEGEIFVSMKTYHEIKSKIEKLSKEKWDNLKGNTELLDSIVNIIANLKDDESIKKEFQKLKIDEDIIDVLLNFEFKKFINLSFKALRKIIPFQFQGQKYITASTSAGYSLKQEGIKNKLVPPAKENINVAVVARAFAQTRKVINAVIRKYGQFDQINIELATELKNSKFDRSKIEEGQKKFQSQKDKIFKEVQELRGGMTPSSSLLLKYRLWREQDERCVYSGRKISFEDLLDTGFLDIDHIIPYSKSMDDSFNNKVLCLAEENRNKKNDIPFNYYQRIDRDWNLLISIITSMKNMKIAKKSRLLKQELSDIEGFIERNINDTRYATRYIKDFLENNLEFKENEFIKVKVQARSGGLTSVLSYNWGMSKDREESYFHHAKDAIIVACSTQGMVQYISKISQQYENDKDKMKKIKDKTENCIPKPWDSFRADVEESIEGIFVSFAPRHKVTGSAHKETIYSKKHLEKERYVTVKKSLDKIKLSDLENIPCNENCGIIRVLKERLEKFKNDSLKAFADPVHMPTKCPNKKGPVIRSVKIKESNKTGIEVRKGLAERGEMVRVDVFIKDKKYYLVPIYVSDFKNKDLPNKAIAALKLENEWIMIDKTYSFKFSLFKDDLIKIKKKKEEIFGYFGGVHRSTGTIKIKSRHKPKEIDEGIGSRCLLDFRKFQVDVLGNYTEVKHEKRMPAYITRKDKKH

SEQ ID NO: 70 - protein, 1067 aa, Verminephrobacter eiseniae
MNKAVAYRLALDLGSTSLGWAIFRLNEAREPTAIIRAGVRIFSDGRNANSEPLAVHRRVARAMRRRRDRLLKRKKRMHDQLVQHGFFPAEVAERKELERLNPYQLRAKGLHEALTPGEFARALFHINQRRGFKSNRKTDRKDNDSGALKQAISELRKRIQDSDCATAGEWFWKERMQQKPEGVRGQWVRARYRKTPSTTDEGKKRIGYDLYVDRAMVEQEFDALWAAQAALQPGLFTEAARAELKDTLLYQRDLRPVKPGRCTLLPAEERAPLALPSTQRFRILQEVNNLRLLDEALREVPLNLAQRDAVVSALEGKKELSFAAIRKLLTLSGKFNLEDEKRAELKGNATSVILARKDLFGDAWAGFDAAVQDEIVWRLVSQESEGALIAWLQQHTGVDGVCAEAIVNTRLPDGYGRLSRKALERIVPALQREVCTYDKAVQAAGFAHHSDLGFDFDYAEDEVQQVGEHTIASTGEVQAQYAFKQLPYYGKALQRHVAFGSGDAKDHEEKCYGKIANPTVHIGLNQVRTVVNALIRRYGHPTEVVVELARDLKQSREQKQQTQREQADNQKRNEDIRKRIAPILETSPERVRDRDIKKWILWEELNKKDIADRHCPYSGERISATMLLSEAVEIEHILPFSRTLDDSLNNRTVAMRRANRIKGDRTPWEARADFEAQGWRYEAILQRAEGMPPRKRYRFAEDGYQRWLGKDRNFLARALNDTSYLSRLAANYLRLVCPQGVRVIPGQMTDKLRGKFGLNSVLGLDGKKNRNDHRHHAVDACVIGVTDQGLMQRFANASKQARENGLTRLVQDMLLPWWPSYYDHVERAVRIRVSHRPDHGFEGAMMKGTAHGIREDGIREDGRIKQRPKAKGSADHKTITLIPIDEPRQLARHGVDAEGKPLPYKGYASGSNYCIEITKNGKGKWEGQVISTFDAYRIKAAADAAARAGQVISTVEADSIVRKSGWERLRGAQSQNGQPLVMRLVIGDSVRMEVDGRDEVMRVVKMSGKEMVFAPVREANVDKRNNMPDEQDPFTYTYKRADQLRKAKARQVTISPIGELRDPGFKG

SEQ ID NO: 71 - protein, 1059 aa, Wolinella succinogenes
MIERILGVDLGISSLGWAIVEYDKDDEAANRIIDCGVRLFTAAETPKKKESPNKARREARGIRRVLNRRRVRMNMIKKLFLRAGLIQDVDLDGEGGMFYSKANRADVWELRHDGLYRLLKGDELARVLIHIAKHRGYKFIGDDEADEESGKVKKAGVVLRQNFEAAGCRTVGEWLWRERGANGKKRNKHGDYEISIHRDLLVEEVEAIFVAQQEMRSTIATDALKAAYREIAFFVRPMQRIEKMVGHCTYFPEERRAPKSAPTAEKFIAISKFFSTVIIDNEGWEQKIIERKTLEELLDFAVSREKVEFRHLRKFLDLSDNEIFKGLHYKGKPKTAKKREATLFDPNEPTELEFDKVEAEKKAWISLRGAAKLREALGNEFYGRFVALGKHADEATKILTYYKDEGQKRRELTKLPLEAEMVERLVKIGFSDFLKLSLKAIRDILPAMESGARYDEAVLMLGVPHKEKSAILPPLNKTDIDILNPTVIRAFAQFRKVANALVRKYGAFDRVHFELAREINTKGEIEDIKESQRKNEKERKEAADWIAETSFQVPLTRKNILKKRLYIQQDGRCAYTGDVIELERLFDEGYCEIDHILPRSRSADDSFANKVLCLARANQQKTDRTPYEWFGHDAARWNAFETRTSAPSNRVRTGKGKIDRLLKKNFDENSEMAFKDRNLNDTRYMARAIKTYCEQYWVFKNSHTKAPVQVRSGKLTSVLRYQWGLESKDRESHTHHAVDAIIIAFSTQGMVQKLSEYYRFKETHREKERPKLAVPLANFRDAVEEATRIENTETVKEGVEVKRLLISRPPRARVTGQAHEQTAKPYPRIKQVKNKKKWRLAPIDEEKFESFKADRVASANQKNFYETSTIPRVDVYHKKGKFHLVPIYLHEMVLNELPNLSLGTNPEAMDENFFKFSIFKDDLISIQTQGTPKKPAKIIMGYFKNMHGANMVLSSINNSPCEGFTCTPVSMDKKHKDKCKLCPEENRIAGRCLQGFLDYWSQEGLRPPRKEFECDQGVKFALDVKKYQIDPLGYYYEVKQEKRLGTIPQMRSAKKLVKK

SEQ ID NO: 72 - protein, 1368 aa, unknown; identical to SEQ ID NO: 59
  microbial

SEQ ID NO: 73 - protein, 1187 aa, unknown
  microbial
MLSRQLLGASHLARPVSYSYNVQDNDVHCSYGERCFMRGKRYRIGIDVGLNSVGLAAVEVSDENSPVRLLNAQSVIHDGGVDPQKNKEAITRKNMSGVARRTRRMRRRKRERLHKLDMLLGKFGYPVIEPESLDKPFEEWHVRAELATRYIEDDELRRESISIALRHMARHRGWRNPYRQVDSLISDNPYSKQYGELKEKAKAYNDDATAAEEESTPAQLVVAMLDAGYAEAPRLRWRTGSKKPDAEGYLPVRLMQEDNANELKQIFRVQRVPADEWKPLFRSVFYAVSPKGSAEQRVGQDPLAPEQARALKASLAFQEYRIANVITNLRIKDASAELRKLTVDEKQSIYDQLVSPSSEDITWSDLCDFLGFKRSQLKGVGSLTEDGEERISSRPPRLTSVQRIYESDNKIRKPLVAWWKSASDNEHEAMIRLLSNTVDIDKVREDVAYASAIEFIDGLDDDALTKLDSVDLPSGRAAYSVETLQKLTRQMLTTDDDLHEARKTLFNVTDSWRPPADPIGEPLGNPSVDRVLKNVNRYLMNCQQRWGNPVSVNIEHVRSSFSSVAFARKDKREYEKNNEKRSIFRSSLSEQLRADEQMEKVRESDLRRLEAIQRQNGQCLYCGRTITFRTCEMDHIVPRKGVGSTNTRTNFAAVCAECNRMKSNTPFAIWARSEDAQTRGVSLAEAKKRVTMFTFNPKSYAPREVKAFKQAVIARLQQTEDDAAIDNRSIESVAWMADELHRRIDWYFNAKQYVNSASIDDAEAETMKTTVSVFQGRVTASARRAAGIEGKIHFIGQQSKTRLDRRHHAVDASVIAMMNTAAAQTLMERESLRESQRLIGLMPGERSWKEYPYEGTSRYESFHLWLDNMDVLLELLNDALDNDRIAVMQSQRYVLGNSIAHDATIHPLEKVPLGSAMSADLIRRASTPALWCALTRLPDYDEKEGLPEDSHREIRVHDTRYSADDEMGFFASQAAQIAVQEGSADIGSAIHHARVYRCWKTNAKGVRKYFYGMIRVFQTDLLRACHDDLFTVPLPPQSISMRYGEPRVVQALQSGNAQYLGSLVVGDEIEMDFSSLDVDGQIGEYLQFFSQFSGGNLAWKHWVVDGFFNQTQLRIRPRYLAAEGLAKAFSDDVVPDGVQKIVTKQGWLPPVNTASKTAVRIVRRNAFGEPRLSSAHHMPCSWQWRHE

SEQ ID NO: 74 - protein, 1274 aa, unknown
  microbial
MNINMNNSIKSKPEVTIGLDLGVGSVGWAIVDNETNIIHHLGSRLFSQAKTAEDRRSFRGVRRLIRRRKYKLKRFVNLIWKYNSYFGFKNKEDILNNYQEQQKLHNTVLNLKLEALNAKIDPKALSWILHDYLKNRGHFYEDNRDFNVYPTEELANYFDEFGYYKGIIDSKNDDDDKLEEGLTKYKFSNQHWLEEVKKVLSNQTGLPEKFKEEYESLFSYVRNYSEGPGSINSVSPYGIYHLDEKEGKVVQKYNNIWDKTIGKCSIFPDEYRAPKNSPIAMIFNEINELSTIRSYSIYLTGWFINQEFKKAYLNKLLDLLIKTNSEKPIDARQFKKLREETIAESIGKETLKDVESEEKLEKDDHKWKLKGLKLNTNGKIQYNDLSSLAKFVHKLKQHLKLDFLLEDQYTPLDKINFLQSLYVYLGKHLRYSNRVDSANLKEFSDSSRLFERVLQEQKDGLFKLFEQTDKDDEKILTQTHSLSTKAMLLAITRMTNLDNDEDNQKNNDKGWNFEAIKNFDQKFIDITKTNNNLSLKQDKRYLDDQFINDAILSPGVKRILREATKVFNAILKQFSEEYDVTKVVIELARELSEEKELENTKNYKKLIKKNGDKISEGLKALGIAEDKIEEILKSPTKSYKVLLWLQQDHIDPYSQKEIAFDDILTKTEKTEIDHIIPYSISFDDSSSNKLLVLAESNQAKSNQTPYEFINSGKAEITWEVYEAYCHKFKNGDSSLLDSTQRSKKFAKMMKTDTSSKYDIGFLARNLNDTRYATIVFRDALKDYANNHLVEDKPMFKVVCINGGVTSFLRKNFDPKSWYAKKDRDKNIHHAVDASIISIFSNETKTLFNQLTKFADYKLFKNTDGSWKKIDPKTGVVSEVTDENWKQIRVRNQVSEIAKVIDKYIQDSNIERKARYSRKIENKTNISLFNDTVYSAKKVGYEDQIKRKNLKTLDIHESAEENKNSKVKKQFVYRKLVNVSLLNNDKLADLFAEKEDILMYRANPWVINLAEQIFNEYTENKKIKSQNVFEKYMLDLTKEFPEKFSEAFVKSMIRNKTAIIYNVEKDVVHRIKRLKILSSELKENKWSNVIIRSKNESGTKLSYQDTINSIALMIMRSIDPTAKKQYIRVPLNTLNLHLGDQDFDLHNIDAYLKKPKFVKYLKANEIGDEYKPWRVLTSGTLLIHKKDKKLMYISSFQNLNDLIEIKNLIETEYKENVDSDPKKKKKASQILRSLSVILNDYILLDAKYNFDILGLSKNKIDEILNSKLDLDKIAK

SEQ ID NO: 75 - protein, 984 aa, unknown
  microbial
MAKILAFDIGISSIGWAFSENDELKDCGVRIFTKAENPKTGESLALPRRIARSARKRLARRKARLNHLKHLIANEFKLNYEDYQSFDEILAKAYKGSLISPYELRFRALNELLSKQDFARVILHIAKRRGYDDIKNNGDEEKGKILKAIKQNEEKLANYQSVGEYLYKEYFQKFKENSKEFINVRNKKESYERCIAQSFLKDELKLIFKKQREFGFSFSKKFEEEVLSVAFYKRALKDFSHLVGNCSFFTDEKRAPKNSPLAFMFVALTRIINLLNNLKNTLYTKDDLNALLNEVLKNGTLTYKQTKKLLGLSDDYEFKGEKGNYFIEFKKYKEFIKALGEHSLSQDDLNEIAKDITLIKDEIKLKKALAKYDLNENQIDNLSKLEFKDHLNISFKALKLITPLMLEGKKYDEACNELTLKVAINEDKKDFLPAFNETYYKDEVTNPVVLRAIKEYRKVLNALLKKYGKVHKINIELAREVGKNHSQRAKIEKEQNENYKAKKDAELECEKLGLKINSKNILKLRLFKEQKEFCVYSGEKIKLSDLQDEKMLEIDHIYPYSRSFDDSYMNKVLVFTKQNQEKLNQTPFEAFGNDSAKWQKIEVLAKNLPTKKQKRILDKNYKDKEQKDFKDRNLNDTRYIARLVLNYTKDYLDFLPLSDDENTKLNDTQKGSKVHVEAKSGMLTSALRHTWGFSTKDRNNHLHHAIDAVIIAYANNSIVKAFSDFKKEQESNTAELYAKKISELDYKNKRKFFEPFSGFRQKVLDKIDEIFVSKPERKKPSGALHEETFRKEEEFYQSYGGKEGVLKALELGKIRKVNGKIVKNGDMFRVDIFKHKKTNKFYAVPIYTMDFALKVLPNKAVARSKKGEIKDWILMDENYEFCFSLYKDSLILIQTKDMQEPEFVYYNAFTSSTVSLIVSKHDNKFETLSKNQKILFKNANEKEVIAKSIGIQNLKVFEKYIVSALGEVTKAEFRQREEFKNELR

SEQ ID NO: 76 - protein, 1082 aa, unknown
  microbial
MAAFKPNPINYILGLDIGIASVGWAMVEIDEDENPICLIDLGVRVFERAEVPKTGDSLAMARRLARSVRRLTRRRAHRLLRARRLLKREGVLQAADFDENGLIKSLPNTPWQLRAAALDRKLTPLEWSAVLLHLIKHRGYLSQRKNEGETADKELGALLKGVADNAHALQTGDFRTPAELALNKFEKESGHIRNQRGDYSHTFSRKDLQAELNLLFEKQKEFGNPHISDGLKEGIETLLMTQRPALSGDAVQKMLGHCTFEPAEPKAAKNTYTAERFIWLTKLNNLRILEQGSERPLTDTERTTLIDEPYRKSKLTYAQARKLLELDNTAFFKGLRYGKDNAEASTLMEMKAYHAISRALEKEGLKDKKSPLNLSPELQDEIGTAFSLFKTDEDITGRLKDRVQPEILEALLKHISFDKFVQISLKALRRIVPLMEQGKRYDEACAEIYGDHYGKKNTEEKIDLPPIPADEIRNPVVLRALSQARKVINGVVRRYGSPARIHIETAREVGKSFKDRKEIEKRQEENRKDREKAATKFREYFPNFVGEPKSKDILKLRLYEQQHGKCLYSGKEINLGRLNEKGYVEIDHALPFSRTWDDSFNNKVLVLGSENQNKGNQTPYEYFNGKDNSREWQEFKARVETSRFPRSKKQRILLQKFDEEGFKERNLNDTRYVNRFLCQFVADHMLLTGKGKRRVFASNGQITNLLRGFWGLRKVRAENDRHHALDAVVVACSTVAMQQKITRFVRYKEMNAFDGKTIDKETGEVLHQKTHFPQPWEFFAQEVMIRVFGKPDGKPEFEEADTPEKLRTLLAEKLSSRPEAVHEYVTPLFVSRAPNRKMSGQGHMETVKSAKRLDEGVSVLRVPLTQLKLKDLEKMVNREREPKLYEALKARLEAHKDDPAKAFAEPFYKYDKAGNRTQQVKAVRVEQVQKTGVWVRNHNGIADNATMVRVDVFEKGDKYYLVPIYSWQVAKGILPDRAVVQGKDEEDWQLIDDSFNFKFSLHPNDLVEVITKKARMFGYFASCHRGTGNINIRIHDLDHKIGKNGILEGIGVKTALSFQKYQIDELGKEIRPCRLKKRPPVR

SEQ ID NO: 77 - protein, 984 aa, unknown
  microbial
MARILAFDIGISSIGWAFSENDELKDCGVRIFTKAENPKTGESLALPRRLARSARKRLARRKARLNHLKHLIANEFKLNYEDYQSFDESLAKAYKGSLISPYELRFRALNELLSKQDFARVILHIAKRRGYDDIKNNGDEEKSEILKAIKQNEEKLVNYQSVGEYLYKEYFQKFKENSKEFINVRNKKESYERCITQSFLKDELKLIFQKQREFGFSFSKKFEEEVLSVAFYKRALKDFSHLVGNCSFFTDEKRAPKNSPLAFMFVALTRIINILNNLKNTEGILYTKDDLNALLNEVLKNGTLTYKQTKKLLGLSDDYEFKGEKGTYFIEFKKYKEFIKALGEHNLSQDDLNEIAKDITLIKDEIKLKKALAKYDLNQNQIDSLSKLEFKDHLNISFKALKLITPLMLEGKKYDEACNELNLKVAINEDKKDFLPAFNETYYKDEVTNPVVLRAIKEYRKILNALLKKYGKVHKINIELAREVGKNHSQRAKIEKEQNENYKAKKDAEIECEKLGLKINSKNILKLRLFKEQKEFCAYSGEKIKLSDLQDEKMLEIDHIYPYSRSFDDSYMNKVLVFTKQNQEKLNKTPFEAFGNDSTKWQKIEVLAKNLPEKKQKRILDKNYKDKEQKDFKDRNLNDTRYIARLVLNYTKDYLDFLPLSDDENTKLNDTQKGSKVHVEAKSGMLTSALRHTWGFSAKDRNNHLHHAIDAAIIAYANNSIVKAFSDFKKEQESNSVELYAKKISELDYKNKRKFFEPFSGFRQKVLDKIDEIFVSKPERKKPSGALHEETFRKEEEFYQSYGGKEGVLKALELGKIRKVNGKIVKNGDMFRVDIFKHKKTNKFYAVPIYTMDFALKVLPNKAVARSKKGEIKDWILMDENYEFCFSLYKDSLILIQTKDMQEPELVYFNAFTSSTVSLIVSKHDNKFETLSKNQKILFKNANEKEVIAKSIGIQNLKVFEKYIVSALGEVTKAEFRQREDFKK

SEQ ID NO: 78 - protein, 1136 aa, unknown
  microbial
MNGLVLGLDIGIASVGVGILEKDTGKIIHASSRLFPAATADNNVERRSNRQGRRLNRRKKHRSVRLQDLFEGYGLLTDFSKVSMNLNPYQLRVQGMENQLTNEELFVALKNIVKRRGISYLDDASEDGGTVSSDYGKAVEENRKLLAEKTPGQIQLERFEKYGQLRGDFTVEENGEKHRLINVFSTSAYRKEAERILRKQQEFNSKITDEFIEDYLIILTGKRKYYHGPGNEKSRTDYGRFRTDGTTLDNIFGILIGKCTFYTEEYRASKASYTAQEFNLLNDLNNLTVPTETKKLSEEQKKLIIEYAKSAKTLGASTLLKYIAKMIDASVDQIRGYRVDVNNKPEMHTFEVYRKMQSLETIKVEELPRKVLDELAHILTLNTEREGIEEAINSKLKDIFNRDQVLELVQFRKNNSSLFSKGWHNFSIKLMMELIPELYETSEEQMTILTRLGKQRSKETSKRTKYIDEKELTEEIYNPVVAKSVRQAIKIINEATKKYGIFDNIVIEMARENNEEDAKKDYIKRQKANQDEKNAAMEKAAFQYNGKKELPDNIFHGHKELTTKIRLWHQQGEKCLYTGKNIPISDLIHNQYKYEIDHILPLSLSFDDSLSNKVLVLATANQEKGQRTPFQALDSMDDAWSYREFKSYVKDSKLLSNKKKDYLLTEEDISKIEVKQKFIERNLVDTRYSSRVVLNALQDFYKSHQLDTTISVVRGQFTSQLRRKWGIEKSRETYHHHAVDALIIAASSQLRLWKKHSNPLIAYKEGQFVDSETGEIVSLSDEEYKELVFKAPYDHFVDTLRSKKFEDSILFSYQVDSKYNRKISDATIYATRKAKLDKEKKEYTYTLGKIKDIYALGTKTPSKTGFYKFLDLYKTDKSQFLMYQKDRKTWDEVIEKIIEQYRPFKEYDKNGKEVDFNPFEKYRIGNGPIRKYSKKGNGPEIKSLKYYDILLGKHKNITPDGSRNTVALLSLNPWRTDVYYNSETKKYEFLGLKYADLCFEEGGAYGISEVKYKKIREKEGIGKNSEFKFTLYKNDLILIKDTETNCQQFFRFWSRTGKDNPKSFEKHKIELKPYEKAKFEKGEELKVLGKVPPSSNQFQKNMQIENLSIYKVKTDILGNKHFIKKEGDEPKLKFKK

SEQ ID NO: 79 - protein, 1371 aa, unknown
  microbial
MDKKYSIGLDIGTNSVGWAVITDDYKVPSKKFKVLGNTDRHSIKKNLIGALLFDSGETAEATRLKRTARRRYTRRKNRIRYLQEIFSSEMSKVDDSFFHRLEESFLVEEDKKHERHPIFGNIVDEVAYHEKYPTIYHLRKKLADSTDKADLRLIYLALAHMIKFRGHFLIEGDLNPDNSDMDKLFIQLVQTYNQLFEENPINASRVDAKAILSARLSKSRRLENLIAQLPGEKRNGLFGNLIALSLGLTPNFKSNFDLAEDAKLQLSKDTYDDDLDNLLAQIGDQYADLFLAAKNLSDAILLSDILRVNSEITKAPLSASMIKRYDEHHQDLTLLKALVRQQLPEKYKEIFFDQSKNGYAGYIDGGASQEEFYKFIKPILEKMDGTEELLAKLNREDLLRKQRTFDNGSIPHQIHLGELHAILRRQEDFYPFLKDNREKIEKILTFRIPYYVGPLARGNSRFAWMTRKSEETITPWNFEEVVDKGASAQSFIERMTNFDKNLPNEKVLPKHSLLYEYFTVYNELTKVKYVTEGMRKPEFLSGKQKEAIVDLLFKTNRKVTVKQLKEDYFKKIECFDSVEISGVEDRFNASLGTYHDLLKIIKDKDFLDNEENEDILEDIVLTLTLFEDKEMIEERLKKYANLFDDKVMKQLKRRHYTGWGRLSRKLINGIRDKQSGKTILDFLKSDGFANRNFMQLINDDSLTFKEAIQKAQVSGQGHSLHEQIANLAGSPAIKKGILQSVKVVDELVKVMGHKPENIVIEMARENQTTQKGQKNSRERMKRIEEGIKELGSQILKEHPVENTQLQNEKLYLYYLQNGRDMYVDQELDINRLSDYDVDHIVPQSFIKDDSIDNKILTRSDKNRGKSDNVPSEEVVKKMKNYWRQLLNAKLITQRKFDNLTKAERGGLSELDKAGFIKRQLVETRQITKHVAQILDSRMNTKYDENDKLIREVKVITLKSKLVSDFRKDFQFYKVREINNYHHAHDAYLNAVVGTALIKKYTKLESEFVYGDYKVYDVRKMIAKSEQEIGKATAKRFFYSNIMNFFKTEITLANGEIRKRPLIETNEETGEIVWDKGRDFATVRKVLSMPQVNIVKKTEVQTGALTNESIYARGSFDKLISRKHRFESSKYGGFGSPTVTYSVLVVAKSKVQDGKVKKIKTGKELIGMTLLDKLVFEKNPLKFIEDKGYGNVQIDKCIKLPKYSLFEFENGTRRMLASVMANNNSRGDLQKANEMFLPAKLVTLLYHAHKIESSKELEHEAYILDHYNDLYQLLSYIERFASLYVDVEKNISKVKELFSNIESYSISEICSSVINLLTLTASGAPADFKFLGTTIPRKRYGSPQSILSSTLIHQSITGLYETRIDLSQLGGD

SEQ ID NO: 80 - protein, 1348 aa, unknown
  microbial
MKKPYTIALDIGTNSVGWVVVTDDYRVPTKKMKVLGNTERKTIKKNLIGALLFDSGDTAEGTRLKRTARRRYTRRKNRLRYLKEIFTEEMAKVDDGFFQRLEDSFYVLEDKEGNKHPIFANLADEVAYHKKYPTIYHLRKELVDNPQKADLRLIYLAVAHIIKFRGHFLIEGTLSSKNNNLQKSFDHLVDTYNLLFEEQRLLTEGINAKELLSAALSKSKRLENLISLIPGQKKTGIFGNIIALSLGLTPNFKANFGLSKDVKLQLAKDTYADDLDSLLAQIGDQYADLFLAAKNLSDAILLSDILTESDEITRAPLSASMVKRYREHHKDLVTLKTLIKDQLPEKYQEIFLDKTKNGYAGYIEGQVSQEEFYKYLKPILARLDGSEPLLLKIDREDFLRKQRTFDNGSIPHQIHLEELHAILRRQEVFYPFLKDNRKKIESLLTFRIPYYVGPLARGHSRFAWVKRKFDGAIRPWNFEEIVDEEASAQIFIEKMTKNDLYLPNEKVLPKHSLLYETFTVYNELTKVKYATEGMTRPQFLSADQKQAIVDLLFKTNRKVTVKQLKENYFKKIECWDSVEITGVEDSFNASLGTYHDLLKIIQDKDFLDNPDNQKIIEDIILTLTLFEDKKMISKRLDQYAHLFDKVVLNKLERHHYTGWGRLSGKLINGIRDKQSGKTILDFLKADGFANRNFMQLIHDSELSFIDEIAKAQVIGKTEYSKDLVGNLAGSPAIKKGISQTIKIVDELVKIMGYLPQQIVIEMARENQTTAQGIKNARQRMRKLEETAKKLGSNILKEHPVDNSQLQNDKRYLYYLQNGKDMYTGDDLDIDYLSSYDIDHIIPQSFIKNNSIDNKVLTSQGANRGKLDNVPSEAIVRKMKGYWQSLLRAGAISKQKFDNLTKAERGGLTQVDKAGFIQRQLVETRQITKHVAQILDSRFNTEFDDHNKRIRKVHIITLKSKLVSDFRKEFGLYKIRDINHYHHAHDAYLNAVVAKAILGKYPQLAPEFVYGDYPKYNSFKERQKATQKMLFYSNILKFFKDQESLHVNSDGEEIWNANKHLPIIKNVLSIPQVNIVKKTEVQTGGFYKESILSKGNSDKLIPRKNNWDTRKYGGFDSPTVAYSVLVIAKMEKGKAKVLKPVKEMVGITIMERTAFEENPVVFLEARGYREIQEHLIIKLPKYSLFELENGRRRLLASASELQKGNELFLPVDYMTFLYLAAHYHELTGSSEDVLRKKYFVDRHLHYFDDIIQMINDFAERHILASSNLEKINHTYHNNSDLPVNERAENIINVFTFVALGAPAAFKFFDATIDRKRYTSTKEVLNATLIHQSVTGLYETRIDLSQLGEN

SEQ ID NO: 81 - protein, 1363 aa, unknown
  microbial
MTKLNQPYGIGLDIGSNSIGFAVVDANSHLLRLKGETAIGARLFREGQSAADRRGSRTTRRRLSRTRWRLSFLRDFFAPHITKIDPDFFLRQKYSEISPKDKDRFKYEKRLFNDRTDAEFYEDYPSMYHLRLHLMTHTHKADPREIFLAIHHILKSRGHFLTPGAAKDFNTDKVDLEDIFPALTEAYAQVYPDLELTFDLAKADDFKAKLLDEQATPSDTQKALVNLLLSSDGEKEIVKKRKQVLTEFAKAITGLKTKFNLALGTEVDEADASNWQFSMGQLDDKWSNIETSMTDQGTEIFEQIQELYRARLLNGIVPAGMSLSQAKVADYGQHKEDLELFKTYLKKLNDHELAKTIRGLYDRYINGDDAKPFLREDFVKALTKEVTAHPNEVSEQLLNRMGQANFMLKQRTKANGAIPIQLQQRELDQIIANQSKYYDWLAAPNPVEAHRWKMPYQLDELLNFHIPYYVGPLITPKQQAESGENVFAWMVRKDPSGNITPYNFDEKVDREASANTFIQRMKTTDTYLIGEDVLPKQSLLYQKYEVLNELNNVRINNECLGTDQKQRLIREVFERHSSVTIKQVADNLVAHGDFARRPEIRGLADEKRFLSSLSTYHQLKEILHEAIDDPTKLLDIENIITWSTVFEDHTIFETKLAEIEWLDPKKINELSGIRYRGWGQFSRKLLDGLKLGNGHTVIQELMLSNHNLMQILADETLKETMTELNQDKLKTDDIEDVINDAYTSPSNKKALRQVLRVVEDIKHAANGQDPSWLFIETADGTGTAGKRTQSRQKQIQTVYANAAQELIDSAVRGELEDKIADKASFTDRLVLYFMQGGRDIYTGAPLNIDQLSHYDIDHILPQSLIKDDSLDNRVLVNATINREKNNVFASTLFAGKMKATWRKWHEAGLISGRKLRNLMLRPDEIDKFAKGFVARQLVETRQIIKLTEQIAAAQYPNTKIIAVKAGLSHQLREELDFPKNRDVNHYHHAFDAFLAARIGTYLLKRYPKLAPFFTYGEFAKVDVKKFREFNFIGALTHAKKNIIAKDTGEIVWDKERDIRELDRIYNFKRMLITHEVYFETADLFKQTIYAAKDSKERGGSKQLIPKKQGYPTQVYGGYTQESGSYNALVRVAEADTTAYQVIKISAQNASKIASANLKSREKGKQLLNEIVVKQLAKRRKNWKPSANSFKIVIPRFGMGTLFQNAKYGLFMVNSDTYYRNYQELWLSRENQKLLKKLFSIKYEKTQMNHDALQVYKAIIDQVEKFFKLYDINQFRAKLSDAIERFEKLPINTDGNKIGKTETLRQILIGLQANGTRSNVKNLGIKTDLGLLQVGSGIKLDKDTQIVYQSPSGLFKRRIPLADL

What is claimed is:

1. A method of producing a mammalian oocyte carrying a modified target sequence in its genome, the method comprising the steps of introducing into a non-human, mammalian oocyte:
(a) a clustered, regularly interspaced, short palindromic repeats (CRISPR)-associated protein 9 (Cas9 protein) or a nucleic acid molecule encoding said Cas9; and
(b-i) a target sequence specific CRISPR RNA (crRNA) and a trans-activating crRNA (tracr RNA) or a nucleic acid molecule encoding said RNAs; or
(b-ii) a chimaeric RNA sequence comprising a target sequence specific crRNA and tracrRNA or a nucleic acid molecule encoding said RNA;
wherein the Cas9 protein introduced in (a) and the RNA sequence(s) introduced in (b-i) or (b-ii) form a protein/RNA complex that specifically binds to the target sequence and introduces a single or double strand break within the target sequence.

2. The method of claim 1, wherein the target sequence is modified by homologous recombination with a donor nucleic acid sequence further comprising the step:
(c) introducing a nucleic acid molecule into the oocyte, wherein the nucleic acid molecule comprises the donor nucleic acid sequence and regions homologous to the target sequence.

3. The method of claim 2, wherein the nucleic acid molecule is a single stranded oligodeoxynucleotide.

4. The method of claim 1, wherein the oocyte is a fertilized oocyte.

5. The method of claim 2, wherein the oocyte is a fertilized oocyte.

6. The method of claim 1, wherein the Cas9 protein or the nucleic acid molecule encoding same and/or the RNA of (b-i) or (b-ii) or the nucleic acid molecule encoding said RNA is/are introduced into the oocyte by microinjection.

7. The method of claim 2, wherein the Cas9 protein or the nucleic acid molecule encoding same and/or the RNA of (b-i) or (b-ii) or the nucleic acid molecule encoding said RNA is/are introduced into the oocyte by microinjection.

8. The method of claim 2, wherein the nucleic acid molecule of (c) is introduced into the oocyte by microinjection.

9. The method of claim 1, wherein the nucleic acid molecule encoding the Cas9 protein is mRNA.

10. The method of claim 2, wherein the nucleic acid molecule encoding the Cas9 protein is mRNA.

11. The method of claim 1, wherein the Cas9 protein has an amino acid sequence as shown in SEQ ID NO: 2.

12. The method of claim 2, wherein the Cas9 protein has an amino acid sequence as shown in SEQ ID NO: 2.

13. The method of claim 2, wherein the regions homologous to the target sequence are localized at the 5′ and 3′ end of the donor nucleic acid sequence.

14. The method of claim 2, wherein the regions homologous to the target sequence comprised in the nucleic acid molecule of (c) have a length of at least 400 bp.

15. The method of claim 1, wherein the modification of the target sequence is selected from the group consisting of substitution, insertion and deletion of a least one nucleotide of the target sequence.

16. The method of claim 2, wherein the modification of the target sequence is selected from the group consisting of substitution, insertion and deletion of a least one nucleotide of the target sequence.

17. The method of claim 1, wherein the oocyte is from a non-human mammal selected from the group consisting of rodents, dogs, felines, primates, rabbits, pigs, and ruminants.

18. The method of claim 2, wherein the oocyte is from a non-human mammal selected from the group consisting of rodents, dogs, felines, primates, rabbits, pigs, and ruminants.

19. A method of producing a mammal carrying a modified target sequence in its genome, the method comprising:
(a) transferring an oocyte produced according to the method of claim 2 to a pseudopregnant female host; and
(b) analyzing offspring delivered by the female host for the presence of the modification.

20. The method of claim 19, wherein the mammal and the host are non-human mammals selected from the group consisting of rodents, dogs, felines, primates, rabbits, pigs and ruminants.

21. The method of claim 19, wherein the oocyte is a fertilized oocyte.

22. The method of claim 20, wherein the oocyte is a fertilized oocyte.
